(19) United States
(12) Patent Application Publication
(10) Pub. No.: US 2022/0119824 A1
(43) Pub. Date: Apr. 21, 2022

(54) IMMUNOSTIMULATORY BACTERIA-BASED VACCINES, THERAPEUTICS, AND RNA DELIVERY PLATFORMS

(71) Applicant: ACTYM THERAPEUTICS, INC., Berkeley, CA (US)

(72) Inventors: Laura Hix GLICKMAN, Oakland, CA (US); Bret Nicholas PETERSON, Oakland, CA (US); Haixing KEHOE, Berkeley, CA (US); Alexandre Charles Michel IANNELLO, Oakland, CA (US); Christopher D. THANOS, Tiburon, CA (US)

(21) Appl. No.: 17/569,290

(22) Filed: Jan. 5, 2022

Related U.S. Application Data
(63) Continuation of application No. PCT/US21/45832, filed on Aug. 12, 2021.
Application No. PCT/US21/45832 is a continuation-in-part of application No. 17/320,200, filed on May 13, 2021.
(60) Provisional application No. 63/188,443, filed on May 13, 2021.
(60) Provisional application No. 63/064,869, filed on Aug. 12, 2020.
(60) Provisional application No. 63/188,443, filed on May 13, 2021.
(60) Provisional application No. 63/064,869, filed on Aug. 12, 2020.

(51) Int. Cl. C12N 15/74; C07K 14/565; C07K 14/47; C12N 1/20; C07K 16/28; A61K 39/00; A61K 9/00; A61P 35/00; A61K 39/39; C12N 15/113; C07K 14/55; C07K 14/715; C07K 14/54

(52) U.S. Cl. CPC C12N 15/74; C07K 2319/00; C07K 14/4705; C12N 1/20; C07K 16/2809; C07K 16/28; A61K 39/0011; A61K 9/007; A61K 9/0043; A61P 35/00; A61K 39/39; C12N 15/1137; C07K 14/55; C07K 14/7155; C07K 14/5443; A61K 2039/55572; C12N 2840/203; C07K 2317/31; A61K 2039/543; A61K 2039/544; A61K 2039/53; A61K 2039/523; C12N 2310/14; C12N 2310/122; C12N 2310/531; C12N 2320/32; C07K 14/565

(57) ABSTRACT

Provided are immunostimulatory bacteria with genomes that are modified to, for example, reduce toxicity and improve the anti-tumor activity, such as by increasing accumulation in the tumor microenvironment, particularly in tumor-resident myeloid cells, improving resistance to complement inactivation, reducing immune cell death, promoting adaptive immunity, and enhancing T-cell function. Also provided are immunostimulatory bacteria for use as vaccines, and for delivery of mRNA. The immunostimulatory bacterium comprise genome modifications resulting in an increase in colonization of phagocytic cells, which delivers encoded therapeutic products to phagocytic cells, and permits, among other routes, systemic administration of the immunostimulatory bacteria. The increase in colonization of phagocytic cells also provides for use of immunostimulatory bacteria for direct tissue administration for use as vaccines.

### RELATED APPLICATIONS

[0001] This application is a continuation of International Patent Application No. PCT/US2021/045832, filed on Aug. 12, 2021, entitled “IMMUNOSTIMULATORY BACTERIA-BASED VACCINES, THERAPEUTICS, AND RNA DELIVERY PLATFORMS,” to Applicant Actym Therapeutics, Inc., and inventors Laura Hix Glickman, Bret Nicholas Peterson, Haixing Kehoe, Alexandre Charles Michel Iannello, and Christopher D. Thanos, which claims priority to U.S. Provisional Application Ser. No. 63/064,869, filed on Aug. 12, 2020, entitled “IMMUNOSTIMULATORY BACTERIA DELIVERY PLATFORM,” to Applicant Actym Therapeutics, Inc., and inventors Laura Hix Glickman, Christopher D. Thanos, Alexandre Charles Michel Iannello, Chris Rae, and Haixing Kehoe, to U.S. Provisional Application Ser. No. 63/188,443, filed May 13, 2021, entitled “IMMUNOSTIMULATORY BACTERIA DELIVERY PLATFORM” to Applicant Actym Therapeutics, Inc., and inventors Laura Hix Glickman, Christopher D. Thanos, Alexandre Charles Michel Iannello, Chris Rae, and Haixing Kehoe, and to U.S. application Ser. No. 17/320,200, filed May 13, 2021, entitled “IMMUNOSTIMULATORY BACTERIA DELIVERY PLATFORMS AND THEIR USE FOR DELIVERY OF THERAPEUTIC PROTEINS,” to Applicant Actym Therapeutics, Inc., and inventors Laura Hix Glickman, Christopher D. Thanos, Alexandre Charles Michel Iannello, Chris Rae, Haixing Kehoe, Bret Nicholas Peterson, and Chingnam Cheung.

[0002] Thus, this application is a continuation of International Patent Application No. PCT/US2021/045832, filed on Aug. 12, 2021, which claims benefit of priority to U.S. Provisional Application Ser. No. 63/064,869, filed on Aug. 12, 2020, and to U.S. Provisional Application Ser. No. 63/188,443, filed May 13, 2021. Benefit of priority is claimed to U.S. Provisional Application Ser. No. 63/064,869, filed on Aug. 12, 2020, and to U.S. Provisional Application Ser. No. 63/188,443, filed May 13, 2021. This application is a continuation-in-part of U.S. application Ser. No. 17/320,200, filed May 13, 2021.

[0003] This application is related to International Patent Application No. PCT/US2020/060307, filed on Nov. 12, 2020, and published as WO 2021/097144 on May 20, 2021, entitled “IMMUNOSTIMULATORY BACTERIA DELIVERY PLATFORMS AND THEIR USE FOR DELIVERY OF THERAPEUTIC PRODUCTS,” to Applicant Actym Therapeutics, Inc., and inventors Christopher D. Thanos, Laura Hix Glickman, Alexandre Charles Michel Iannello, Chris Rae, Haixing Kehoe, Bret Nicholas Peterson, and Chingnam Cheung.

[0004] This application is related to International Patent Application No. PCT/US2020/020240, filed on Feb. 27, 2020, and published as WO 2020/176809 on Sep. 3, 2020, and to co-pending U.S. patent application Ser. No. 16/824,500, filed on Mar. 19, 2020, and published as U.S. Publication No. US 2020-0270613 A1 on Aug. 27, 2020, each entitled “IMMUNOSTIMULATORY BACTERIA ENGINEERED TO COLONIZE TUMORS, TUMOR-RESIDENT IMMUNE CELLS, AND THE TUMOR MICROENVIRONMENT,” to Applicant Actym Therapeutics, Inc., and inventors Christopher D. Thanos, Laura Hix Glickman, Justin Skoble, Alexandre Charles Michel Iannello, and Haixing Kehoe.

[0005] This application also is related to International Patent Application No. PCT/US2018/041713, filed on Jul. 11, 2018, and published as WO 2019/014398 on Jan. 17, 2019, and to U.S. patent application Ser. No. 16/033,187, filed on Jul. 11, 2018, published as U.S. Publication No. 2019/0017050 A1 on Jan. 17, 2019, and issued as U.S. Pat. No. 11,168,326 on Nov. 9, 2021, each entitled “ENGINEERED IMMUNOSTIMULATORY BACTERIAL STRAINS AND USES THEREOF.”

[0006] This application also is related to International Patent Application No. PCT/US2019/041489, filed on Jul. 11, 2019, and published as WO 2020/014543 on Jan. 16, 2020, entitled “ENGINEERED IMMUNOSTIMULATORY BACTERIAL STRAINS AND USES THEREOF.”

[0007] The immunostimulatory bacteria provided in each of these applications can be modified as described in this application, and such bacteria are incorporated by reference herein. The subject matter of each of these applications is incorporated by reference in its entirety.

### INCORPORATION BY REFERENCE OF SEQUENCE LISTING PROVIDED ELECTRONICALLY

[0008] An electronic version of the Sequence Listing is filed herewith, the contents of which are incorporated by reference in their entirety. The electronic file was created on Dec. 30, 2021, is 878 kilobytes in size, and is titled 1708SEQ001.txt.

### FIELD OF THE INVENTION

[0009] Provided are attenuated immunostimulatory bacteria with genomes that are modified to, for example, reduce undesirable inflammatory responses and toxicity, and improve the anti-tumor activity and/or immunostimulatory activity by increasing resistance to complement inactivation, by reducing immune cell death, by promoting adaptive immunity, and by enhancing T-cell function. The increase in colonization of phagocytic cells, for anti-cancer uses improves the delivery of encoded therapeutic products to the tumor microenvironment and to tumors, and permits, among other routes, systemic administration of the immunostimulatory bacteria. For use as vaccines, by appropriate administration, the bacteria can colonize phagocytic cells, including in tissues colonized by pathogens.

### BACKGROUND

[0010] The field of cancer immunotherapy has made great strides, as evidenced by the clinical successes of anti-CTLA-4, anti-PD-1 and anti-PD-L1 immune checkpoint antibodies (see, e.g., Buchbinder et al. (2015) J. Clin. Invest. 125:3377-3383; Hodi et al. (2010) N. Engl. J. Med. 363(8):711-723; and Chen et al. (2015) J. Clin. Invest. 125:3384-3391). Tumors have evolved a profoundly immunosuppressive environment. They initiate multiple mechanisms to evade immune surveillance, reprogram anti-tumor immune cells to suppress immunity, and continually mutate resistance to the latest cancer therapies (see, e.g., Mahoney et al. (2015) Nat. Rev. Drug Discov. 14(8):561-584). Designing immunotherapies and cancer therapies that overcome immune tolerance and escape, while limiting the autoimmune-related toxicities of current immunotherapies, challenges the field of immuno-oncology. Hence, additional and innovative immunotherapies and other therapies are needed.

### SUMMARY

[0011] Provided herein are immunostimulatory bacteria that are cancer therapeutics by virtue of their ability to effectively colonize tumors, particularly tumor resident immune cells, and by virtue of the encoded payloads that result in an anti-tumor immune response. Because of their ability to colonize tumors and the tumor microenvironment, immunostimulatory bacteria provided herein can be used to treat immune desert (immune-excluded) tumors, which have scarce or absent T-cell infiltration in the tumor microenvironment and tumors. These include tumors with stromal barriers. The immunostimulatory bacteria provided herein can turn so-called “cold” tumors, which are resistant to or non-responsive to immunotherapy into “hot” tumors.

[0012] These immunostimulatory bacteria include genome modifications described herein, such that they are TLR2/4/5 attenuated, such as by virtue of elimination of flagella, the msbB⁻/pagP⁻ phenotype, as well as additional mutations, such as the elimination of curli fimbriae, and also other mutations, such as the ansB⁻ phenotype. These bacteria can proliferate in vivo. The payloads encoded in the plasmid(s) in the bacteria are those that are part of a cytosolic DNA/RNA sensor pathway that leads to expression of type I interferon (IFN). In particular, these products include gain-of-function mutations to render expression of type I IFN constitutive. These immunostimulatory bacteria also can encode a cytokine or cytokines, such as an IL-15, particularly as an IL-15/IL-15R alpha chain complex, and can encode tumor-associated antigens and/or bi-specific T-cell engager antibodies. For cancer therapy the bacteria can be administered systemically.

[0013] Also provided herein are immunostimulatory bacteria that can be used and/or formulated as vaccines for administration into tissues, such as by intramuscular injection, inhalation, and other such direct routes. These bacteria are designed to be non-replicating in vivo, and, thus, comprise a nutritional auxotrophy, such as a thyA⁻ so that they do not express active thymidylate synthase, and they encode the payload under control of a promoter recognized in the bacterium. If they are intended to deliver protein payloads to a vaccinated host, the encoded payloads include sequences or are designed so that they are translated in the bacterial host. If they are intended to deliver RNA, then the encoding nucleic acids are designed so that the bacterial ribosomes cannot translate them, but so that eukaryotic ribosomes can translate them. This can be effected, for example, by include an IRES in the encoding nucleic acid. The payloads of the vaccines include nucleic acid encoding the immunizing antigen or protein, such as an antigen from a viral or bacterial pathogen. Payloads also can include immunostimulatory proteins, such as a product, such as STING, particularly modified STING, that is part of a cytosolic DNA/RNA sensor pathway that leads to expression of type I interferon (IFN), and also, optionally, a cytokine, such as an IL-15, such as IL-15/IL-15R alpha chain complex. The vaccines are formulated for a suitable route of administration, and include aerosols and emulsions, tablets, and powders.

[0014] Provided are immunostimulatory bacteria that contain genome modifications and a plasmid that encodes one or more therapeutic products, such as anti-cancer therapeutics or associated treatments. The genome modifications result in immunostimulatory bacteria that accumulate in the tumor microenvironment and in tumor-resident immune cells, where they express the encoded therapeutic products. The immunostimulatory bacteria provided herein encoded one or a plurality of complementary products that stimulate or induce or result in a robust anti-cancer response in the subject.

[0015] Because of the similarity in the immune response between an anti-tumor response and an anti-viral response, immunostimulatory bacteria provided herein also can be used to treat infectious diseases. The immunostimulatory bacteria can encode an anti-viral or anti-bacterial therapeutic, such as an inhibitor of a viral or bacterial product, or an inhibitor of the expression of a viral or bacterial product, or a viral or bacterial antigen. The combination of the immune response from the immunostimulatory bacteria and the therapeutic anti-pathogen product, and also to the immunostimulatory proteins and other such therapeutics, provides a therapeutic immunostimulatory bacterium for vaccinating against and/or for treating infectious diseases, particularly diseases associated with viral infections, such as chronic viral infections and latent viral infections. Of interest are chronic viral infections, such as infections by hepatitis viruses, herpesviruses, varicella zoster virus (VZV), Epstein-Barr virus (EBV), human immunodeficiency virus (HIV), human T-cell leukemia virus (HTLV), Respiratory Syncytial Virus (RSV), measles virus, and other such viruses that chronically infect subjects. The immunostimulatory bacteria also can be used for treatment of acute infections as well, such as initial infections with chronic influenza, P. gingivalis, and coronaviruses, such as Severe Acute Respiratory Syndrome coronavirus (SARS-CoV), Middle East Respiratory Syndrome coronavirus (MERS-CoV), and Severe Acute Respiratory Syndrome coronavirus 2 (SARS-CoV-2, which causes COVID-19). Targeted pathogenic bacteria also include, for example, species of Escherichia, Staphylococcus, Pseudomonas, and Porphyromonas.

[0016] The immunostimulatory bacteria provided herein can encode an antigen or antigens from a pathogen, such as a viral antigen, and are used as a vaccine to prevent infection, or to treat existing infections. Antigens include, but are not limited to, any that are known to those of skill in the art to elicit an immmunoprotective response or to ameliorate a disease resulting from the pathogen. These immunostimulatory bacteria, by virtue of the ability to accumulate in immune cells, such as antigen-presenting cells, can prime the T-cell response to a pathogen, such as a virus. For example, as described in detail herein, among the immunostimulatory bacteria provided herein are those that are deficient in asparaginase II, an enzyme that suppresses the function of T-cells. Any of the immunostimulatory bacteria described and provided herein can be used. For example, it is described and shown herein, that eliminating asparaginase II activity, such as by modifying the bacterial genome to eliminate expression of active enzyme, can be used to encode an antigen or combination of antigens. The resulting bacteria promote an anti-pathogen, such as anti-viral, T-cell response. The combination of expression of an antigen, such as from a pathogen, bacterial or viral or other, with the ability to accumulate in immune cells, such as antigen-presenting cells, provides protection from infection by the pathogen. For example, the immunostimulatory bacteria can encode a viral antigen, such as an antigen from an essential viral core protein shared among a family of viruses or across viral families. For example, in the case of a coronavirus, such as SARS-COV2, an antigen from the nucleocapsid and/or non-structural M proteins that can enhance CD8⁺ T-cell responses to heavily conserved and less mutated core proteins, thereby providing broad pan-coronavirus protection, to provide effective vaccines and treatments. Proteins and antigens from this corona virus and corona virus family that are used for immunization and/or treatment are known, and exemplary ones are described herein and known to those of skill in the art. In addition to spike proteins, portions thereof, and modified spike proteins, others proteins have been identified for this purpose. See, e.g., Cohen et al., (2021) Cell Reports Medicine 2:1000354.

[0017] The immunostimulatory bacteria can encode an anti-viral therapeutic or anti-bacterial therapeutic. Such therapeutics include inhibitors of viral genes and proteins, such as proteins required for replication and/or packaging, or the immunostimulatory bacteria can encode a therapeutic that prevents binding or interaction of a virus with a receptor or receptors that facilitate or provide for viral entry into a target cell. In some embodiments, expression of the encoded therapeutic protein, such as the antigen or antigenic protein, can be under the control of a prokaryotic promoter. In other embodiments, the protein can be expressed under control of a eukaryotic promoter. The choice of promoter depends upon whether it is to be expressed in the bacterium, such as before administration as described herein for delivery of mRNA that is translated in the host, or the protein is to be expressed in the host cells, such as immune cells, after delivery.

[0018] The immunostimulatory bacteria provided herein include genome modifications, such as deletions, disruptions, and other alterations that result in inactive encoded product, such as changing the orientation of all or part of the gene, so that functional gene products are not expressed. Among the immunostimulatory bacteria provided are those that are modified so that the resulting bacteria are msbB⁻/purI⁻. In some embodiments, the bacteria are msbB⁻ and purI⁻, whereby the full length of at least the coding portion of the msbB and/or purI genes are/is deleted. The genome of the bacteria also can be modified so that the bacteria lack flagella. This is effected in bacteria that normally express flagella. In such bacteria, for example, the fliC and fljB genes in Salmonella, or equivalent genes in other species to fliC and fljB, can be deleted or otherwise modified so that functional gene product is not expressed. The bacteria also can be modified so that they are adenosine auxotrophs, and/or are msbB⁻/pagP⁻. Also provided are immunostimulatory bacteria and pharmaceutical compositions containing them, where the bacteria do not express L-asparaginase II, whereby the bacteria are ansB⁻. Elimination of the encoded asparaginase activity improves or retains T-cell viability/activity. Therapeutic bacteria, such as inactivated or attenuated bacteria that are used as vaccines, can be improved by modifying the bacterial genome to eliminate asparaginase activity. Exemplary of such vaccines is the BCG (Bacillus Calmette-Guérin) vaccine and related vaccines, which are used to immunize against tuberculosis. The BCG vaccine is known to have variable effectiveness; eliminating the asparaginase can improve the effectiveness of such vaccine, because the endogenous bacterial asparaginase inhibits or reduces T-cell activity.

[0019] Provided herein are immunostimulatory bacteria that contain a plasmid encoding a therapeutic product, or combinations of therapeutic products, under control of a eukaryotic promoter. The genomes of the bacteria can contain modifications, such as one, two, or more modifications, selected from among:

[0020] a) deletion or disruption of all or of a sufficient portion of a gene or genes, whereby the bacterium has been modified to generate penta-acylated lipopolysaccharide (LPS), wherein:

[0021] the genome of the immunostimulatory bacterium is modified by deletion or disruption of all or of a sufficient portion of a gene or genes, whereby the bacterium has been modified to generate penta-acylated lipopolysaccharide; and

[0022] hexa-acylated lipopolysaccharide is substantially reduced, by at least 10-fold, compared to the wild-type bacterium, or is absent;

[0023] b) deletion or disruption of all or of a sufficient portion of a gene or genes, whereby the bacterium has attenuated recognition by Toll-like Receptors (TLR) 2, TLR4, and/or TLR5;

[0024] c) deletion or disruption of all or of a sufficient portion of a gene or genes, whereby the bacterium does not activate the synthesis of curli fimbriae and/or cellulose;

[0025] d) deletion or disruption of all or of a sufficient portion of a gene or genes, whereby the bacterium does not activate the synthesis of secreted asparaginase;

[0026] e) deletion or disruption of all or of a sufficient portion of a gene or genes, whereby the bacterium is auxotrophic for purines, for adenosine, and/or for ATP;

[0027] f) deletion or disruption of all or of a sufficient portion of a gene or genes, whereby the bacterium lacks flagella;

[0028] g) deletion or disruption of all or of a sufficient portion of a gene or genes, whereby the bacterium has been modified to specifically infect tumor-resident myeloid cells;

[0029] h) deletion or disruption of all or of a sufficient portion of a gene or genes, whereby the bacterium has been modified to specifically infect tumor-resident myeloid cells, and is unable to replicate in tumor-resident myeloid cells; and

[0030] i) deletion or disruption of either or both of lppA and lppB, to decrease or eliminate lipoprotein expression in the membrane, whereby expression of an encoded therapeutic protein is increased in the tumor microenvironment and/or in tumor-resident immune cells.

[0031] For example, the immunostimulatory bacteria contain modifications, including deletions, insertions, and replacements, of a), d), and f), or modifications c) and d), or modifications a), c), d), e), and f), or modifications a), c), d), e), f), and i), or modifications a), d), f), and i), or modifications c), d), and i), or modifications f) and i), or modifications a)-i), or modifications a), b), d), and f), or modifications a), b), c), and d), and other combinations of modifications a)-i). Deletion or disruption includes any modification of a gene whereby active gene product is not expressed.

[0032] In particular, provided are immunostimulatory bacteria whose genomes are modified by deletion or disruption, including by insertion, of all or of a sufficient portion of a gene or genes, whereby the bacteria have attenuated recognition by TLR2, TLR4, and TLR5. Such bacteria have low toxicity and accumulate in/colonize the tumor microenvironment and tumor-resident myeloid cells, such as macrophages. These bacteria contain plasmids that encode therapeutic products, particularly combinations of complementary products, such as a cytokine and a modified STING polypeptide, including gain-of-function/constitutively active STING proteins, STING chimeras, and chimeric STING proteins that include gain-of-function (GOF) mutations. The cytokines include, for example, IL-15/IL-15R alpha chain complex (also referred to herein as IL-15Rα/IL-15sc, or IL-15/IL-15Rα, or IL-15 complex), or IL-15, or IL-12, or other anti-tumor immune stimulating cytokines or chemokines. The bacteria can additionally encode other products, such as anti-tumor antibodies. Combinations of products are described and provided herein. The combinations of products that stimulate or promote an anti-tumor response and/or deliver a therapeutic product, are described throughout the disclosure herein, and they are delivered by the immunostimulatory bacteria whose genomes are modified so that the bacteria have low toxicity and effectively colonize tumors, the tumor microenvironment, and/or tumor-resident immune cells, such as macrophages. Exemplary of such bacteria are those of species, such as Salmonella, Listeria, and Escherichia, that are modified so that they do not have flagella, and are modified so that they contain lipopolysaccharide (LPS) with penta-acylated lipid A, such as by rendering the bacteria msbB⁻/pagP⁻. The bacteria additionally can be modified by elimination of curli fimbriae and/or have reduced or eliminated cellulose production and biofilm formation, such as by modifying the bacteria so that they are csgD⁻. It is shown herein that bacteria with these modifications have no maximum tolerated dose (MTD), and exhibit high tumor colonization.

[0033] In all embodiments, the immunostimulatory bacteria also can comprise or further comprise deletion of or disruption of the genes encoding the flagella, whereby the bacterium is flagellin⁻ (such as, for example, fliC⁻/fljB⁻) and does not produce flagella, wherein the wild-type bacterium has flagella. The immunostimulatory bacteria can be auxotrophic for purines, such as auxotrophic for adenosine; or auxotrophic for adenosine, adenine, and/or ATP. The immunostimulatory bacteria also can be purI⁻. The immunostimulatory bacteria also can be pagP⁻. The immunostimulatory bacteria also can be aspartate-semialdehyde dehydrogenase-(asd⁻), such as where the bacterium is asd⁻ by virtue of disruption or deletion of all or a portion of the endogenous gene encoding aspartate-semialdehyde dehydrogenase (asd), whereby endogenous asd is not expressed. The bacteria can encode aspartate-semialdehyde dehydrogenase (asd) on the plasmid under control of a bacterial promoter. The immunostimulatory bacteria also can be msbB⁻, or can be pagP⁻/msbB⁻. For example, the immunostimulatory bacteria can be asd⁻, purI⁻, msbB⁻, flagellin⁻ (fliC⁻/fljB⁻), and pagP⁻, or they can be asd⁻, csgD⁻, purI⁻, msbB⁻, flagellin⁻ (such as fliC⁻/fljB⁻), and pagP⁻. In some embodiments, the immunostimulatory bacteria are ansB⁻, asd⁻, csgD⁻, purI⁻, msbB⁻, flagellin⁻ (such as fliC⁻/fljB⁻), and pagP⁻.

[0034] Provided are immunostimulatory bacteria that contain a plasmid encoding a therapeutic product under control of a eukaryotic promoter, or that encode a plurality of products under control of a plurality of eukaryotic promoters, or under control of a single promoter. The genome of the immunostimulatory bacteria is modified by deletion of a sufficient portion of a gene or genes, or by the disruption of a gene or genes, whereby the bacterium is one or more of ansB⁻, asd⁻, csgD⁻, purI⁻, msbB⁻, flagellin⁻ (such as fliC⁻/fljB⁻), and pagP⁻. The immunostimulatory bacteria provided herein also include those that have the genes lppA (lpp1) and/or lppB (lpp2), which encode major outer membrane lipoproteins Lpp1 (LppA) and Lpp2 (LppB), respectively, deleted or disrupted, to eliminate or substantially reduce expression of the encoded lipoprotein(s). In particular, the immunostimulatory bacteria are lppA⁻ and lppB⁻. Provided are immunostimulatory bacteria that contain a plasmid encoding an anti-cancer therapeutic, or an anti-pathogen therapeutic, under control of eukaryotic regulatory sequences, and that are lppA⁻ and lppB⁻. For example, the immunostimulatory bacteria can be ansB⁻, asd⁻, csgD⁻, purI⁻, msbB⁻, flagellin⁻ (such as fliC⁻/fljB⁻), pagP⁻, lppA⁻, and/or lppB⁻.

[0035] In embodiments herein, the therapeutic product is an anti-cancer therapeutic or a therapeutic used in cancer therapy. The encoded product(s) can be operably linked to nucleic acid encoding a secretion signal, whereby, when expressed, the therapeutic product is secreted, such as secreted from a tumor-resident immune cell.

[0036] Any of the immunostimulatory bacteria also can have one or more genes or operons, involved in Salmonella pathogenicity island 1 (SPI-1) invasion, deleted or inactivated, whereby the immunostimulatory bacteria do not invade or infect epithelial cells. For example, the one or more genes/operons are selected from among avrA, hilA, hilD, invA, invB, invC, invE, invF, invG, invH, invI, invJ, iacP, iagB, spaO, spaQ, spaR, spaS, orgA, orgB, orgC, prgH, prgI, prgJ, prgK, sicA, sicP, sipA, sipB, sipC, sipD, sirC, sopB, sopD, sopE, sopE2, sprB, and sptP.

[0037] The plasmid in the immunostimulatory bacteria can be present in low copy number or medium copy number. The plasmid can contain a medium-to-low copy number origin of replication, such as a low copy number origin of replication. The plasmid may be present in medium-to-low copy number depending on the ORI sequence, the size of the plasmid, and culturing conditions. In some embodiments, the plasmid is present in higher copy number. Generally, medium copy number is less than 150 or less than about 150, and more than 20 or about 20, or is between 20 or 25 and 150; and low copy number is less than 25, or less than 20, or less than about 25, or less than about 20 copies. In particular, low to medium copy number is less than about 150 copies, or less than 150 copies; low copy number is less than about 25 copies, or less than 25 copies.

[0038] Encoded therapeutic products include nucleic acids and proteins. The plasmid can encode two or more therapeutic products. Exemplary products include, but are not limited to, a cytokine, a protein that constitutively induces a type I IFN, and a co-stimulatory receptor or ligand. Further exemplary combinations are described below. In some embodiments, the co-stimulatory molecule lacks all or a portion of the cytoplasmic domain for expression on an antigen-presenting cell (APC), whereby the truncated molecule is capable of constitutive immuno-stimulatory signaling to a T-cell through co-stimulatory receptor engagement, and is unable to counter-regulatory signal to the antigen-presenting cell (APC), due to the deleted cytoplasmic domain or deleted portion thereof.

[0039] The encoded therapeutic products can be operatively linked to nucleic acid encoding regulatory sequences recognized by a eukaryotic host, such as, for example, secretion signals, to effect secretion from a cell comprising the bacterium or plasmid. In embodiments where the immunostimulatory bacteria encode two or more products, expression of each product can be under control of a separate promoter. Alternatively, two or more products can be expressed under control of a single promoter, and each product is separated by nucleic acid encoding, for example, an internal ribosomal entry site (IRES), or a 2A peptide, to effect separate expression of each encoded therapeutic product. Exemplary 2A peptides are T2A, F2A, E2A, or P2A, which can flank nucleic acids encoding the therapeutic products, to effect separate expression of the therapeutic products expressed under control of a single promoter. The therapeutic products are expressed under control of a eukaryotic promoter, such as an RNA polymerase (RNAP) II promoter, or an RNA polymerase III promoter. These include an RNA polymerase II promoter that is a viral promoter, or a mammalian RNA polymerase II promoter, such as, but not limited to, a cytomegalovirus (CMV) promoter, an SV40 promoter, an Epstein-Barr virus (EBV) promoter, a herpesvirus promoter, an adenovirus promoter, an elongation factor-1 alpha (EF-1α) promoter, a UBC promoter, a PGK promoter, a CAGG promoter, an adenovirus 2 or 5 late promoter, an eIF4A1 promoter, a CAG promoter, or a CD68 promoter. The plasmids further can include other eukaryotic regulatory sequences, such as terminators and/or promoters, selected from among SV40, human growth hormone (hGH), bovine growth hormone (bGH), MND (a synthetic promoter that contains the U3 region of a modified MoMuLV LTR with myeloproliferative sarcoma virus enhancer), chicken beta-globulin, and rbGlob (rabbit globulin) genes, to control expression of the therapeutic product(s). Other regulatory sequences include a poly(A) tail, a Woodchuck Hepatitis Virus (WHP) Posttranscriptional Regulatory Element (WPRE), and a Hepatitis B virus Posttranscriptional Regulatory Element (HPRE).

[0040] The encoded therapeutic products include any described herein and in the original claims, such as nucleic acid encoding a protein that is part of a cytosolic DNA/RNA sensor pathway that leads to expression of type I interferon (IFN), or a variant thereof Type I IFNs include interferon-α and interferon-β. Variants include those that, when expressed in a subject, lead to constitutive expression of type I IFN. These include a gain-of-function (GOF) variant that does not require cytosolic nucleic acids, nucleotides, dinucleotides, or cyclic dinucleotides (CDNs) to result in expression of type I IFN. Exemplary of these proteins is a protein selected from among STING, RIG-I, MDA-5, IRF-3, IRF-5, IRF-7, IRF-8, TRIM56, RIP1, Sec5, TRAF3, TRAF2, TRAF6, STAT1, LGP2, DDX3, DHX9, DDX1, DDX9, DDX21, DHX15, DHX33, DHX36, DDX60, and SNRNP200, and variants thereof that have increased activity, or that result in constitutive expression of type I interferon (IFN). Variants include a variant of STING, RIG-I, IRF-3, or MDA5, in which one or more serine (S) or threonine (T) residue(s) that is/are phosphorylated as a consequence of viral infection, is/are replaced with an aspartic acid (D) residue, whereby the resulting variant is a phosphomimetic that constitutively induces type I IFN, and any known to those of skill in the art and/or described herein. Variants include, for example, those wherein the mutations are selected as follows: a) in STING, with reference to SEQ ID NOs: 305-309, one or more selected from among: S102P, V147L, V147M, N154S, V155M, G166E, C206Y, G207E, S102P/F279L, F279L, R281Q, R284G, R284S, R284M, R284K, R284T, R197A, D205A, R310A, R293A, T294A, E296A, R197A/D205A, S272A/Q273A, R310A/E316A, E316A, E316N, E316Q, S272A, R293A/T294A/E296A, D231A, R232A, K236A, Q273A, S358A/E360A/S366A, D231A/R232A/K236A/R238A, S358A, E360A, S366A, R238A, R375A, N154S/R284G, and S324A/S326A; b) in MDA5, with reference to SEQ ID NO:310, one or more of: T331I, T331R, A489T, R822Q, G821S, A946T, R337G, D393V, G495R, R720Q, R779H, R779C, L372F, and A452T; c) in RIG-I, with reference to SEQ ID NO:311, one or both of E373A and C268F; and d) in IRF-3, with reference to SEQ ID NO:312, S396D, such as a variant STING that contains one or more amino replacement(s) selected, with reference to SEQ ID NOs: 305-309, from among: S102P, V147L, V147M, N154S, V155M, G166E, C206Y, G207E, S102P/F279L, F279L, R281Q, R284G, R284S, R284M, R284K, R284T, R197A, D205A, R310A, R293A, T294A, E296A, R197A/D205A, S272A/Q273A, R310A/E316A, E316A, E316N, E316Q, S272A, R293A/T294A/E296A, D231A, R232A, K236A, Q273A, S358A/E360A/S366A, D231A/R232A/K236A/R238A, S358A, E360A, S366A, R238A, R375A, N154S/R284G, and S324A/S326A, and conservative replacements thereof, and combinations thereof.

[0041] The immunostimulatory bacteria also can encode an immunostimulatory protein that confers or contributes to an anti-tumor immune response in the tumor microenvironment. These include, but are not limited to, a cytokine, a chemokine, or a co-stimulatory molecule. Exemplary of these is a protein selected from among one or more of: IL-2, IL-7, IL-12p70 (IL-12p40+IL-12p35), IL-15, IL-36 gamma, IL-2 that has attenuated binding to IL-2Ra, IL-15/IL-15R alpha chain complex, IL-18, IL-21, IL-23, IL-2 that is modified so that it does not bind to IL-2Ra, CXCL9, CXCL10, CXCL11, interferon-α, interferon-β, interferon-γ, CCL3, CCL4, CCL5, proteins that are involved in or that effect or potentiate the recruitment and/or persistence of T cells, CD40, CD40 ligand (CD40L), CD28, OX40, OX40 ligand (OX40L), 4-1BB, 4-1BB ligand (4-1BBL), members of the B7-CD28 family, CD47 antagonists, an anti-IL-6 antibody or an IL-6 binding decoy receptor, TGF-beta polypeptide antagonists, and members of the tumor necrosis factor receptor (TNFR) superfamily. The co-stimulatory molecule, selected from among CD40, CD40 ligand, CD28, OX40, OX40 ligand, 4-1BB, and 4-1BB ligand, can be truncated, such that the molecule lacks a cytoplasmic domain, or a portion thereof, for expression on an antigen-presenting cell (APC); and the truncated gene product is capable of constitutive immunostimulatory signaling to a T-cell through co-stimulatory receptor engagement, and is unable to counter-regulatory signal to the antigen-presenting cell (APC), due to the deleted, or partially deleted, or truncated cytoplasmic domain, which eliminates the immunosuppressive reverse signaling. Other such proteins are TGF-beta polypeptide antagonists, such as an anti-TGF-beta antibody or a fragment thereof, an anti-TGF-beta receptor antibody or a fragment thereof, a soluble TGF-beta antagonist polypeptide, or a TGF-beta binding decoy receptor.

[0042] The plasmids can encode a therapeutic antibody or antigen-binding fragment thereof, such as, for example, a Fab, Fab′, F(ab′)₂, single-chain Fv (scFv), Fv, dsFv, nanobody, diabody fragment, or a single-chain antibody. Examples include, but are not limited to, an antagonist of PD-1, PD-L1, CTLA-4, VEGF, VEGFR2, or IL-6.

[0043] The plasmids can encode complementary products whose expression results in enhanced anti-tumor or other activity. For example, the combination of a modified, such as a constitutively active and/or chimeric STING protein described herein, with a cytokine, such as IL-15/IL-15R alpha chain complex (IL-15Rα-IL-15sc), has synergistic activity.

[0044] As described herein, the immunostimulatory bacteria provided herein can be used as a vaccine by encoding an antigen against which an immune response, or immunization, or immunoprotection is desired. The immunostimulatory bacteria herein can be used to deliver RNA, such as mRNA or other forms, for use as a vaccine or for delivery of a therapeutic. As described herein, the bacteria contain a plasmid that encodes a product of interest, such as a therapeutic product, such as an antigen from a pathogen, under control of a bacterial or other prokaryotic promoter recognized by the bacterium. The encoding nucleic acid cassette includes a regulatory sequence or other sequence that blocks or inhibits or prevents translation by bacterial ribosomes, but that permits, provides for, or enhances translation by eukaryotic ribosomes, such as those present in human cells. The bacteria are modified so that they cannot grow or replicate in eukaryotes, such as by rendering the bacteria asd⁻ which require DAP for growth in vitro, or thyA⁻, which requires thymidine monophosphate precursors, for growth, but can be cultured in vitro so that they produce the encoded RNA. A skilled person can inactivate the gene or product by modifying the endogenous gene, such as by deletions, insertions, replacements, transpositions, or any such modification so that active enzyme is not produced. See, SEQ ID NO: 464 for an exemplary thyA gene from Salmonella, and SEQ ID NO:465 for the encoded protein. RNA, encoding protein and/or antigen for immunization, is encoded in the plasmid, but the encoding nucleic acid includes translation signals/sequences so that bacteria cannot translate the this RNA. The resulting bacteria deliver the encoded RNA into the host phagocytic cells, where it is translated by host cell ribosomes. Immunostimulatory bacteria that are thyA⁻ have genome modifications, such insertions, deletions, replacements, or other changes, that result in inactive or eliminate production of thymidylate synthase, which catalyzes the reductive methylation of dUMP to dTMP, a DNA biosynthesis precursor (precursor to dTTP).

[0045] ΔthyA auxotrophies for other nutrients and essential products can be introduced in place of or in addition to the asd inactivation/deletion. Other deletions or inactivation of genes or gene products required for growth, such as genes that produce nutrients, can be used in place of or in addition to the asd, and include for example thyA (see, e.g., Loessner et al. (2006) FEBS Lett 265:81-88). Elimination of expression or production or other attenuating mutations of the bacterial genome for production of such products results in release of encoded macromolecules upon bacterial cell death in vivo after administration. Asd is an essential enzyme for bacterial cell wall synthesis; ThyA is an enzyme needed for DNA synthesis. Mutation of the respective genes renders the strain auxotrophic for diaminopimelic acid (DAP) or thymidine monophosphate precursors. Upon deprivation of the complementing substrates, such bacteria die by DAP-less or thymineless death, resulting in release of bacterial proteins and plasmid. Inactivation or elimination of Asd, results in release of macromolecules; elimination or inactivation of ThyA (to produce ΔthyA bacteria) expression/activity does not result in release of macromolecules, including proteins and plasmids, upon thymidine starvation (Loessner et al. (2006) FEBS Lett 265:81-88). Thus, ΔthyA are advantageous for in vivo delivery of plasmids to host cells, since the bacteria will not prematurely release their contents. Since the bacteria provided here infect or accumulate in myeloid cells, such as phagocytic cells, such as macrophage, dendritic cells, monocytes and neutrophils, which consume bacteria, the intact ΔthyA bacteria, release the plasmid encoding the therapeutic product inside the targeted cells.

[0046] The bacteria are genome-modified so that they are attenuated, such as the bacteria herein, where the response by toll-like receptors (TLR) 2, 4, and 5 is reduced, compared to bacteria without such genome modifications, and optionally, encode rck (resistance to complement killing) to reduce inactivation by complement, and include modifications, as needed, so that they infect primarily or only phagocytic cells, such as tissue-resident macrophages. It is shown herein that genome modifications, such the combination of modifications that reduce responses by TLRs 2,4,5, are necessary for the production of type I IFN by human antigen-presenting cells.

[0047] Provided are bacteria that contain genome modifications, whereby the response by toll-like receptors (TLRs) 2, 4, and 5 is reduced, compared to the bacteria without the genome modifications. Such modifications include those that result in penta-acylated LPS and elimination of flagella, such as the pagP⁻/msbB⁻ bacteria that lack flagella, and also those that are deficient or do not produce or express asparaginase II, such as those that are ΔansB. The bacteria also can comprise further genomic modifications such as one or more modifications whereby they are auxotrophic for a required nutrient or for a factor, so that they are unable to replicate in a eukaryotic host, but can replicate in vitro when supplied with the nutrient or factor, such auxotrophic for thymidine (ΔthyA), such as by genome modifications that render them unable to produce or express thymidylate synthase (ΔthyA), or Asd.

[0048] The bacteria that are provided herein that combine some or all of these traits are used to express therapeutic products, including anti-cancer products, and antigens, depending upon their intended use. For administration to subjects with cancer, the bacteria, which accumulate in tumor-resident myeloid cells, encode anti-cancer therapeutics, such as products that result in stimulation of an immune response, and/or that result in inhibiting immunosuppression, or that encode a product that treats the tumor, and those that encode a combination of products that can act synergistically to treat cancer. The bacteria provided herein that accumulate in or infect phagocytic cells, also can be used for subjects that do not have cancer, such as, as vaccines by delivering or encoding an antigen, or delivering RNA. The various embodiments and combinations of properties and products, and uses, are described throughout the disclosure herein.

[0049] In some embodiments, the bacteria comprise a plasmid containing nucleic acid encoding a product, or comprise RNA encoding the product, where the product encoded by the nucleic acid or RNA is an antigenic sequence or sequence from a pathogenic virus, bacterium, parasite, or is a tumor antigen, whereby, upon expression of the encoded antigen in the host, the host develops an immune-protective response or immunizing response against the pathogenic virus, bacterium, parasite, or tumor antigen, or the encoded product is a therapeutic product; expression of the antigenic sequence(s) is/are under control of a prokaryotic promoter so that RNA encoding the antigen(s) is/are produced in the bacteria; nucleic acid encoding the antigen comprises regulatory sequences that inhibit or prevent translation of encoded RNA by bacterial ribosomes, but that does not inhibit or prevent translation of the encoded RNA by eukaryotic host ribosomes, whereby translation is de-coupled from transcription in the bacteria; the resulting bacteria are selective for infecting phagocytic cells when administered to a eukaryotic subject, and deliver the nucleic acid into the phagocytic cells, wherein the RNA is translated.

[0050] The bacteria, which are cultured in vitro to produce the RNA, upon administration, infect the phagocytes and deliver their contents, but they are not viable and/or do not replicate, thereby providing the RNA, such as mRNA, to the host cells, which translate the RNA to produce the encoded product, such as an immunogenic protein or antigen. The RNA generally is mRNA, and also can be other forms of RNA, such as RNAi, or eRNA (circular RNA), and other therapeutic forms. The immunostimulatory bacteria that are used for this purpose can include the plasmids, which encode the RNA, in high or higher (generally 150 or greater) copy numbers, to increase the amount of RNA delivered. Various embodiments are described, claimed, and exemplified herein. The mRNA can encode pathogen proteins, pathogen antigens, tumor-antigens, therapeutic products for treatment of tumors or infections, and combinations thereof. The mRNA can be synthetic, such as those designed for immunization (see, e.g., U.S. patent publication 20190351040, and others that describe mRNA for immunization or treatment). The resulting bacteria are vaccines for therapy or immunization. The payloads can include products that are adjuvants, that are immunostimulatory protein, that induce type I interferon (IFN) to activate T-cells in concert with the immunizing antigen/protein.

[0051] In some embodiments, the immunostimulatory bacteria provided herein contain a plasmid that encodes two or more therapeutic proteins selected from among: a) an immunostimulatory protein that confers or contributes to an anti-tumor immune response in the tumor microenvironment; b) one or more of a protein that is part of a cytosolic DNA/RNA sensor pathway that leads to expression of type I interferon (IFN), or a variant thereof that has increased activity to increase expression of type I IFN, or a variant thereof that results in constitutive expression of a type I IFN; and c) an anti-cancer antibody or antigen-binding portion thereof. For example, the immunostimulatory protein can be a co-stimulatory molecule that is one that lacks a cytoplasmic domain or a sufficient portion thereof, for expression on an antigen-presenting cell (APC), whereby the truncated co-stimulatory molecule is capable of constitutive immunostimulatory signaling to a T-cell through co-stimulatory receptor engagement, and is unable to counter-regulatory signal to the antigen presenting cell (APC). In some embodiments, the immunostimulatory bacteria encode at least two therapeutic products, selected from among a cytokine, a protein that constitutively induces a type I IFN, a co-stimulatory molecule, and an anti-cancer antibody or antigen-binding portion thereof, which can be under control of a single promoter. For example, expression of the nucleic acid encoding at least two or all of the products is under control of a single promoter, and the nucleic acid encoding each product is separated by nucleic acid encoding 2A polypeptides, whereby, upon translation, each product is separately expressed. The nucleic acid encoding each product can be operatively linked to nucleic acid encoding a sequence that directs secretion of the expressed product from a cell.

[0052] Provided are immunostimulatory bacteria that encode two or more therapeutic products, wherein at least one product is selected from a), and at least one is selected from b), and a) is IL-2, IL-7, IL-12p70 (IL-12p40+IL-12p35), IL-15, IL-23, IL-36 gamma, IL-2 that has attenuated binding to IL-2Ra, IL-15/IL-15R alpha chain complex (also referred to herein as IL-15/IL-15Rα, IL-15 complex, or other variations), IL-18, IL-2 that is modified so that it does not bind to IL-2Ra, CXCL9, CXCL10, CXCL11, interferon-α, interferon-β, CCL3, CCL4, CCL5, proteins that are involved in or that effect or potentiate the recruitment and/or persistence of T cells, CD40, CD40 ligand (CD40L), OX40, OX40 ligand (OX40L), 4-1BB, 4-1BB Ligand (4-1BBL), members of the B7-CD28 family, TGF-beta polypeptide antagonists, or members of the tumor necrosis factor receptor (TNFR) superfamily; and b) is STING, RIG-I, MDA-5, IRF-3, IRF-5, IRF-7, TRIM56, RIP1, Sec5, TRAF3, TRAF2, TRAF6, STAT1, LGP2, DDX3, DHX9, DDX1, DDX9, DDX21, DHX15, DHX33, DHX36, DDX60, and SNRNP200. They also can encode one or more of a TGF-beta inhibitory antibody, a TGF-beta binding decoy receptor, an anti-IL6 antibody, or an IL-6 binding decoy receptor.

[0053] Exemplary of combinations of encoded therapeutic products are any of the following combinations of therapeutic products: IL-2 and IL-12p70; IL-2 and IL-21; IL-2, IL-12p70, and a STING GOF variant; IL-2, IL-21, and a STING GOF variant; IL-2, IL-12p70, a STING GOF variant, and 4-1BBL (including 4-1BBLΔcyt), where Δcyt is a deleted cytoplasmic domain; IL-2, IL-21, a STING GOF variant, and 4-1BBL (including 4-1BBLΔcyt); IL-15/IL-15Rα, and a STING GOF variant; IL-15/IL-15Rα, a STING GOF variant, and 4-1BBL (including 4-1BBLΔcyt); IL-15/IL-15Rα and IL-12p70; IL-15/IL-15Rα and IL-21; IL-15/IL-15Rα, IL-12p70, and a STING GOF variant; IL-15/IL-15Rα, IL-21, and a STING GOF variant; IL-15/IL-15Rα, IL-12p70, a STING GOF variant, and 4-1BBL (including 4-1BBLΔcyt); IL-15/IL-15Rα, IL-21, a STING GOF variant, and 4-1BBL (including 4-1BBLΔcyt); IL-12p70 and IL-21; IL-12p70, IL-21, and a STING GOF variant; IL-12p70, IL-21, a STING GOF variant, and 4-1BBL (including 4-1BBLΔcyt); IL-12p70 and a STING GOF variant; IL-12p70, a STING GOF variant, and 4-1BBL (including 4-1BBLΔcyt); IL-12p70 and IL-18; IL-12p70, IL-18, and a STING GOF variant; IL-12p70, IL-18, a STING GOF variant, and 4-1BBL (including 4-1BBLΔcyt); a TGF-β decoy receptor, IL-2, and IL-12p70; a TGF-β decoy receptor, IL-2, and IL-21; a TGF-β decoy receptor, IL-2, IL-12p70, and a STING GOF variant; a TGF-β decoy receptor, IL-2, IL-21, and a STING GOF variant; a TGF-β decoy receptor, IL-2, IL-12p70, a STING GOF variant, and 4-1BBL (including 4-1BBLΔcyt); a TGF-β decoy receptor, IL-2, IL-21, a STING GOF variant, and 4-1BBL (including 4-1BBLΔcyt); a TGF-β decoy receptor, IL-15/IL-15Rα, and a STING GOF variant; a TGF-β decoy receptor, IL-15/IL-15Rα, a STING GOF variant, and 4-1BBL (including 4-1BBLΔcyt); a TGF-β decoy receptor, IL-15/IL-15Rα, and IL-12p70; a TGF-β decoy receptor, IL-15/IL-15Rα, and IL-21; a TGF-β decoy receptor, IL-15/IL-15Rα, IL-12p70, and a STING GOF variant; a TGF-β decoy receptor, IL-15/IL-15Rα, IL-21, and a STING GOF variant; a TGF-β decoy receptor, IL-15/IL-15Rα, IL-12p70, a STING GOF variant, and 4-1BBL (including 4-1BBLΔcyt); a TGF-β decoy receptor, IL-15/IL-15Rα, IL-21, a STING GOF variant and, 4-1BBL (including 4-1BBLΔcyt); a TGF-β decoy receptor, IL-12p70, and IL-21; a TGF-β decoy receptor, IL-12p70, IL-21, and a STING GOF variant; a TGF-β decoy receptor, IL-12p70, IL-21, a STING GOF variant, and 4-1BBL (including 4-1BBLΔcyt); a TGF-β decoy receptor and IL-12p70; a TGF-β decoy receptor, IL-12p70, and a STING GOF variant; a TGF-β decoy receptor, IL-12p70, a STING GOF variant, and 4-1BBL (including 4-1BBLΔcyt); a TGF-β decoy receptor, IL-12p70, and IL-18; a TGF-β decoy receptor, IL-12p70, IL-18, and a STING GOF variant; a TGF-β decoy receptor, IL-12p70, IL-18, a STING GOF variant, and 4-1BBL (including 4-1BBLΔcyt); a TGF-β decoy receptor and a STING GOF variant; an anti-CTLA-4 antibody, IL-2, and IL-12p70; an anti-CTLA-4 antibody, IL-2, and IL-21; an anti-CTLA-4 antibody, IL-2, IL-12p70, and a STING GOF variant; an anti-CTLA-4 antibody, IL-2, IL-21, and a STING GOF variant; an anti-CTLA-4 antibody, IL-2, IL-12p70, a STING GOF variant, and 4-1BBL (including 4-1BBLΔcyt); an anti-CTLA-4 antibody, IL-2, IL-21, a STING GOF variant, and 4-1BBL (including 4-1BBLΔcyt); an anti-CTLA-4 antibody, IL-15/IL-15Rα, and a STING GOF variant; an anti-CTLA-4 antibody, IL-15/IL-15Rα, a STING GOF variant, and 4-1BBL (including 4-1BBLΔcyt); an anti-CTLA-4 antibody, IL-15/IL-15Rα, and IL-12p70; an anti-CTLA-4 antibody, IL-15/IL-15Rα, and IL-21; an anti-CTLA-4 antibody, IL-15/IL-15Rα, IL-12p70, and a STING GOF variant; an anti-CTLA-4 antibody, IL-15/IL-15Rα, IL-21, and a STING GOF variant; an anti-CTLA-4 antibody, IL-15/IL-15Rα, IL-12p70, a STING GOF variant, and 4-1BBL (including 4-1BBLΔcyt); an anti-CTLA-4 antibody, IL-15/IL-15Rα, IL-21, a STING GOF variant, and 4-1BBL (including 4-1BBLΔcyt); an anti-CTLA-4 antibody, IL-12p70, and IL-21; an anti-CTLA-4 antibody, IL-12p70, IL-21, and a STING GOF variant; an anti-CTLA-4 antibody, IL-12p70, IL-21, a STING GOF variant, and 4-1BBL (including 4-1BBLΔcyt); an anti-CTLA-4 antibody and IL-12p70; an anti-CTLA-4 antibody, IL-12p70, and a STING GOF variant; an anti-CTLA-4 antibody, IL-12p70, a STING GOF variant, and 4-1BBL (including 4-1BBLΔcyt); an anti-CTLA-4 antibody, IL-12p70, and IL-18; an anti-CTLA-4 antibody, IL-12p70, IL-18, and a STING GOF variant; an anti-CTLA-4 antibody, IL-12p70, IL-18, a STING GOF variant, and 4-1BBL (including 4-1BBLΔcyt); an anti-CTLA-4 antibody and a STING GOF variant; a CD40 agonist, IL-2, and IL-12p70; a CD40 agonist, IL-2, and IL-21; a CD40 agonist, IL-2, IL-12p70, and a STING GOF variant; a CD40 agonist, IL-2, IL-21, and a STING GOF variant; a CD40 agonist, IL-2, IL-12p70, a STING GOF variant, and 4-1BBL (including 4-1BBLΔcyt); a CD40 agonist, IL-2, IL-21, a STING GOF variant, and 4-1BBL (including 4-1BBLΔcyt); a CD40 agonist, IL-15/IL-15Rα, and a STING GOF variant; a CD40 agonist, IL-15/IL-15Rα, a STING GOF variant, and 4-1BBL (including 4-1BBLΔcyt); a CD40 agonist, IL-15/IL-15Rα, and IL-12p70; a CD40 agonist, IL-15/IL-15Rα, and IL-21; a CD40 agonist, IL-15/IL-15Rα, IL-12p70, and a STING GOF variant; a CD40 agonist, IL-15/IL-15Rα, IL-21, and a STING GOF variant; a CD40 agonist, IL-15/IL-15Rα, IL-12p70, a STING GOF variant, and 4-1BBL (including 4-1BBLΔcyt); a CD40 agonist, IL-15/IL-15Rα, IL-21, a STING GOF variant, and 4-1BBL (including 4-1BBLΔcyt); a CD40 agonist, IL-12p70, and IL-21; a CD40 agonist, IL-12p70, IL-21, and a STING GOF variant; a CD40 agonist, IL-12p70, IL-21, a STING GOF variant, and 4-1BBL (including 4-1BBLΔcyt); a CD40 agonist and IL-12p70; a CD40 agonist, IL-12p70, and a STING GOF variant; a CD40 agonist, IL-12p70, a STING GOF variant, and 4-1BBL (including 4-1BBLΔcyt); a CD40 agonist, IL-12p70, and IL-18; a CD40 agonist, IL-12p70, IL-18, and a STING GOF variant; a CD40 agonist, IL-12p70, IL-18, a STING GOF variant, and 4-1BBL (including 4-1BBLΔcyt); and a CD40 agonist and a STING GOF variant.

[0054] Other combinations of products include, for example, IL-15 and a STING gain-of-function variant, including STING chimeras with a gain-of-function mutation or mutations, as provided herein, or IL-15Rα-IL-15sc and a STING gain-of-function variant, including STING chimeras with a gain-of-function mutation or mutations. Other products or combinations thereof include a bi-specific T-cell engager (BiTe®); a BiTe® and a STING protein, such as a modified GOF STING protein or a STING chimera, as described herein; a BiTe® and IL-15; a BiTe® and IL-15Rα-IL-15sc; a BiTe®, IL-15 and a STING protein, such as a modified GOF STING protein or chimeric STING protein; and a BiTe®, IL-15Rα-IL-15sc, and a STING protein, such as a modified GOF STING protein or chimeric STING protein, where the BiTe® targets include, for example, DLL3, EGFR, Her2, CEA, Mesothelin, PSMA, EpCAM, CD74, Folate Receptor, Nectin4, EphA2, CA-IX, B7H3, Siglec-15, Muc1, Lewis Y antigen, and other such tumor antigens/tumor targets.

[0055] Also provided are therapeutic compositions containing a tumor antigen(s) and a STING gain-of-function variant or STING chimera; a therapeutic composition of a tumor antigen(s) and IL-15; a therapeutic composition of a tumor antigen(s) and IL-15Rα-IL-15sc; a therapeutic composition of a tumor antigen(s), IL-15, and a STING gain-of-function variant or STING chimera; and a therapeutic composition of a tumor antigen(s), IL-15Rα-IL-15sc, and a STING gain-of-function variant or STING chimera. These products can be encoded in the immunostimulatory bacteria. The tumor antigens can be any listed or described herein (for example, in Example 35), or known in the art.

[0056] Combinations of products also include combinations of antigens and immune stimulating proteins. The antigens can be tumor antigens, or they can be immunizing antigens, such as pathogenic antigens, where the pathogens include, for example, bacteria, protozoans, viruses, and prions, and other prion-like particles that cause diseases and disorders. The antigens include any described or listed herein, or known in the art. The combinations include, for example, combinations of one or more antigens and IFNα2; one or more antigens and IFN-β; one or more antigens, IFNα2, and IFN-β; one or more antigens and an IRF3 GOF variant with the mutation S396D; and one or more antigens, IFNα2, and an IRF3 GOF variant with the mutation S396D.

[0057] Other products and combinations of products that are encoded in the immunostimulatory bacteria provided herein, include, but are not limited to, the combination of IFNα2 and an IRF3 GOF variant with the mutation S396D; IFNα2 and IFN-β; FLT-3L (FMS-like tyrosine kinase 3 ligand; see, e.g., SEQ ID NO:436); sialidase (see, e.g., SEQ ID NO:435); the IL-12 p35 subunit of IL-12p70 only; Azurin; a membrane anchored/tethered cytokine or molecule, such as, for example, IL-2, IL-12, IL-12p35, IL-21, IL-15, IL-15Rα-IL-15sc, or FLT-3L; or a TLR8 agonist, such as, for example, where the TL38 agonist is polyU or polyU/G, a microRNA, or is miR-21.

[0058] Also provided are modified non-human Stimulator of Interferon Genes (STING) proteins, and STING protein chimeras, as well as delivery vehicles, including any described herein, pharmaceutical compositions, cells encoding or containing these STING proteins, and uses thereof, and methods of treatment of cancers. In particular, the immunostimulatory bacteria provided herein encode the modified non-human STING proteins, non-human STING proteins, and STING chimeras, as described herein. These STING proteins that are encoded by the immunostimulatory bacteria are provided herein and described throughout.

[0059] Provided herein are modified non-human STING proteins, where the non-human STING protein is one that has lower NF-κB activation than the human STING protein, and, optionally, higher type I interferon activation activity compared to the wild-type (WT) human STING protein. These non-human STING proteins are modified to include a mutation or mutations so that they have increased activity, or act constitutively, in the absence of cytosolic nucleic acid signaling. The mutations are typically amino acid mutations that occur in interferonopathies in humans, such as those described above for human STING. The corresponding mutations are introduced into the non-human species STING proteins, where corresponding amino acid residues are identified by alignment. Also, in some embodiments, the TRAF6 binding site in the C-terminal tail (CTT) of the STING protein is deleted, reducing NF-κB signaling activity.

[0060] Provided are modified STING proteins, particularly human STING proteins, that are chimeras, in which the CTT (C-terminal tail) region in the STING protein from one species, such as human, is replaced with the CTT from a STING protein of another species that has lower NF-κB signaling activity and/or higher type I IFN signaling activity than human STING. Also, the TRAF6 binding site is optionally deleted in these chimeras.

[0061] The modified STING proteins also include the mutations as set forth throughout the disclosure herein.

[0062] Also provided are delivery vehicles, such as immunostimulatory bacteria, and any provided herein or known to those of skill in the art, including, for example, exosomes, nanoparticles, minicells, cells, liposomes, lysosomes, oncolytic viruses, and other viral vectors, that encode the modified STING proteins of any of 1-3.

[0063] Also provided are delivery vehicles, such as immunostimulatory bacteria, any provided herein or known to those of skill in the art, including, for example, exosomes, nanoparticles, minicells, cells, liposomes, lysosomes, oncolytic viruses, and other viral vectors, that encode unmodified STING from a non-human species whose STING protein has reduced NF-κB signaling activity compared to that of human STING, and optionally, increased type I interferon stimulating/signaling activity compared to that of human STING.

[0064] Also provided are cells (non-zygotes, if human), such as cells used for cell therapy, such as T-cells and stem cells, and cells used to produce the STING proteins as described herein. Also provided are pharmaceutical compositions that contain the STING proteins, or the delivery vehicles, or the cells, or combinations thereof.

[0065] Uses and methods of treatment of cancer and vaccination against pathogens or cancer by administering any the immunostimulatory bacteria as described herein are provided.

[0066] Assays and methods to assess NF-κB activity (signaling activity), and type I interferon stimulating activity or interferon-β stimulating activity of STING are described herein, and also, are known to those of skill in the art. Methods include those described, for example, in de Oliveira Mann et al. (2019) Cell Reports 27:1165-1175, which describes, inter alia, the interferon-β and NF-κB signaling activities of STING proteins from various species, including human, thereby identifying STING proteins from various species that have lower NF-κB activity than human STING, and those that also have comparable or higher interferon-β activity than human STING. de Oliveira Mann et al. (2019) provides species alignments and identifies domains of STING in each species, including the CTT domain (see, also, the Supplemental Information for de Oliveira Mann et al. (2019)).

[0067] The non-human STING proteins can be, but are not limited to, STING proteins from the following species: Tasmanian devil (Sarcophilus harrisii; SEQ ID NO:349), marmoset (Callithrix jacchus; SEQ ID NO:359), cattle (Bos taurus; SEQ ID NO:360), cat (Felis catus; SEQ ID NO:356), ostrich (Struthio camelus australis; SEQ ID NO:361), crested ibis (Nipponia nippon; SEQ ID NO:362), coelacanth (Latimeria chalumnae; SEQ ID NOs:363-364), boar (Sus scrofa; SEQ ID NO:365), bat (Rousettus aegyptiacus; SEQ ID NO:366), manatee (Trichechus manatus latirostris; SEQ ID NO:367), ghost shark (Callorhinchus milii; SEQ ID NO:368), and mouse (Mus musculus; SEQ ID NO:369). These vertebrate STING proteins readily activate immune signaling in human cells, indicating that the molecular mechanism of STING signaling is shared in vertebrates (see, de Oliveira Mann et al. (2019) Cell Reports 27:1165-1175).

[0068] It is shown herein that the immunostimulatory bacteria provided herein, by virtue of the ability to infect myeloid cells, such as tumor-resident and tissue-resident macrophages, and the ability to retain viability for at least a limited time, and/or to deliver plasmids that encode therapeutic products that result in expression of type I IFN and/or other immune-stimulating products, such as gain-of-function (GOF) variants that do not require cytosolic nucleic acids, nucleotides, dinucleotides, or cyclic dinucleotides (CDNs) to result in expression of type I IFN, can convert macrophages that have the M2 phenotype into M1 or M1-like macrophages, with immunosuppressive properties reduced or eliminated, and immune-stimulating, anti-tumor or anti-viral properties enhanced or added. Provided are immunostimulatory bacteria that contain a plasmid encoding a therapeutic product, where infection of a macrophage, including human macrophages, by the bacterium, converts an M2 macrophage to an M1 phenotype or M1-like phenotype macrophage. Provided are immunostimulatory bacteria that contain a plasmid encoding a therapeutic product whose expression in a macrophage results in the conversion of, or converts, M2 macrophages, such as human M2 macrophages, to an M1 or M1-like phenotype. The immunostimulatory bacteria with such properties include any of the bacteria provided herein that contain genome modifications that result in infection of tumor-resident (in subjects with cancer), and tissue-resident myeloid cells. These genome modifications include those that result in a lack of flagella, wherein the wild-type bacterium has flagella, and others, such as those that result in bacteria that are pagP⁻/msbB⁻. Other modifications include those that result in the elimination of asparaginase activity, such as modifications that result in bacteria that are ansB⁻, in the bacteria that infect myeloid cells, which thereby enhances T-cell activities, and other modifications that alter the lipopolysaccharide (LPS). These immunostimulatory bacteria provided herein convert immunosuppressive phagocytic macrophages to immunostimulatory, phagocytic macrophages that are capable of in situ antigen cross-presentation to CD8+ T-cells, and of migration to lymph nodes to prime CD4+ and CD8+ T-cells.

[0069] Included are immunostimulatory bacteria that encode therapeutic products in macrophages, that facilitate or result in the conversion of, or that convert, M2 macrophages to an M1 or M1-like phenotype, which has a profile of some or all characteristics of M1 macrophage. Exemplary of the therapeutic products are those that are part of a cytosolic DNA/RNA sensor pathway that leads to expression of type I interferon (IFN), particularly constitutive expression. This includes the gain-of-function (GOF) variants of therapeutic products that are part of the cytosolic DNA/RNA sensor pathway, and that do not require cytosolic nucleic acids, nucleotides, dinucleotides, or cyclic dinucleotides (CDNs) to result in expression of type I IFN, such as the variant and non-human STING proteins, STING chimeras, and STING chimeras with gain-of-function mutations, as described and provided herein. The bacteria include any that can be modified as described herein, including the species listed herein, such as Salmonella species and strains.

[0070] Also provided are immunostimulatory bacteria that contain nucleic acid operatively linked to a prokaryotic promoter, where: the nucleic acid comprises RNA that lacks sequences necessary for translation by a prokaryotic cell, whereby the RNA is produced in the bacterium, but is not translated into protein. For example, the RNA lacks a Shine-Dalgarno sequence, and comprises an Internal Ribosome Entry Site (IRES) and/or a translational read-through 2A peptide. The IRES sequence prevents translation by prokaryotic ribosomes, but provides for translation by eukaryotic ribosomes. The bacteria include immunostimulatory bacteria in which the 2A peptide is one or more of T2A, P2A, E2A, or F2A, to produce discrete products from polycistronic constructs.

[0071] Also provided are immunostimulatory bacteria as described herein that can be a delivery vehicle for delivering RNA to eukaryotic cells, such as myeloid cells. These bacteria include nucleic acid operatively linked to a prokaryotic promoter, where: the nucleic acid and prokaryotic promoter generally are encoded on a plasmid, but in some embodiments, are encoded in the bacterial genome; the nucleic acid comprises RNA that lacks sequences necessary for translation by the bacterial ribosomes, whereby the RNA is produced in the bacterium, and where: the RNA lacks a Shine-Dalgarno sequence, and comprises an Internal Ribosome Entry Sequence (IRES), or a translational read-through 2A peptide. The prokaryotic promoter, when operatively linked to nucleic acid encoding a therapeutic protein (or non-bacterial protein), can be a bacterial promoter or a phage promoter, such as a bacteriophage promoter. The RNA polymerase that recognizes the phage promoter can be encoded in the bacterial genome, or on a plasmid for expression in the bacteria. Exemplary prokaryotic promoters include any known to those of skill in the art, including, but not limited to, those that comprise all or a sufficient portion of (sufficient to initiate transcription of an operatively linked nucleic acid) the promoters whose sequences are set forth in any of SEQ ID NOs: 393-396, respectively:

(SEQ ID NO: 393)
attatgtcttgacatgtagtgagtgggctggtataatgcagcaag,
(SEQ ID NO: 394)
ttatgatgacgctgcgtaaggtttttgttataatacaccaag,
or
(SEQ ID NO: 395)
attatgtcttgacatgtagtgagtgggctggtaaatgcagcaag,
or
(Salmonella rpsM promoter; SEQ ID NO: 396)
gatcccggagttcatgcgtgatgcaatgaaagtgccgttctacttcggtg
ggacctcactgcttatcgttgttgtcgtgattatggactttatggctcaa
gtgcaaactctgatgatgtccagtcagtatgagtctgcattgaagaaggc
gaacctgaaaggctacggccgttaattggtcgcctgagaagttacggaga
gtaaaaatgaaagttcgtgcttccgtcaagaaattatgccgtaactgcaa
aatcgttaagcgtgatggtgtcatccgtgtgatttgcagtgccgagccga
agcataaacagcgccaaggctgattttttcgcatatttttcttgcaaagt
tgggttgagctggctagattagccagccaatcttttgtatgtctgtacgt
ttccatttgagtatcctgaaaacgggcttttcagcatggtacgtacatat
taaatagtaggagtgcatagtggcccgtatagcaggcattaacattcctg
atcagaaacacgccgtgatcgcgttaacttcgatctacggtgteggcaag
acccgttctaaagccatcctggctgcagcgggtatcgctgaaaatgttaa
gatcctctagatttaagaaggagatatacat.

These immunostimulatory bacteria comprise genomic modifications, as described herein, whereby the bacteria infect tissue-resident myeloid cells, and/or tumor-resident myeloid cells, or, in subjects that do not have tumors, in phagocytic cells, such as macrophages. The bacteria infect the cells and deliver the RNA, which is translated in the eukaryotic host cell. Exemplary of such bacteria, are those that are modified to lack flagella, such as by deletion or disruption of the genes involved in producing flagella. The bacteria are species and strains that, without the genomic modifications, have flagella.

[0072] Also provided are immunostimulatory bacteria in which an encoded therapeutic product, such as a protein, is linked to a moiety that confers an improved pharmacological property, such as a pharmacokinetic or pharmacodynamic property, such as increased serum half-life. Hence, provided are immunostimulatory bacteria, where an encoded therapeutic product comprises an Fc domain, or a half-life extending moiety, such as human serum albumin, or a portion thereof. Half-life extension modalities or methods, include, for example, PEGylation, modification of glycosylation, sialylation, PASylation (modification with polymers of PAS amino acids that are about 100-200 residues in length), ELPylation (see, e.g., Floss et al. (2010) Trends Biotechnol. 28(1):37-45), HAPylation (modification with a glycine homopolymer), fusion to human serum albumin, fusion to GLK, fusion to CTP, GLP fusion, fusion to the constant fragment (Fc) domain of a human immunoglobulin (IgG), fusion to transferrin, fusion to non-structured polypeptides, such as XTEN (also referred to as rPEG, which is a genetic fusion of non-exact repeat peptide sequences, containing A, E, G, P, S, and T; see, e.g., Schellenberger et al. (2009) Nat. Biotechnol. 27(12):1186-1190), and other such modifications and fusions that increase the size, increase the hydrodynamic radius, alter the charge, or target to receptors for recycling rather than clearance, and combinations of such modifications and fusions.

[0073] Also provided are immunostimulatory bacteria, where the encoded therapeutic product comprises the B7 protein transmembrane domain, or where the therapeutic product is GPI-anchored by virtue of an endogenous or added GPI anchor. The encoded therapeutic product can comprise a fusion to collagen.

[0074] The immunostimulatory bacteria in any and all embodiments can be any suitable species. Where reference is made to particular genes and gene modifications, the genes and modifications are those that correspond to the genes and modifications referenced with respect to Salmonella, as an exemplary species. Species and strains include, for example, a strain of Rickettsia, Klebsiella, Bordetella, Neisseria, Aeromonas, Francisella, Corynebacterium, Citrobacter, Chlamydia, Haemophilus, Brucella, Mycobacterium, Mycoplasma, Legionella, Rhodococcus, Pseudomonas, Helicobacter, Vibrio, Bacillus, and Erysipelothrix. For example, Rickettsia rickettsii, Rickettsia prowazekii, Rickettsia tsutsugamushi, Rickettsia mooseri, Rickettsia sibirica, Bordetella bronchiseptica, Neisseria meningitidis, Neisseria gonorrhoeae, Aeromonas eucrenophila, Aeromonas salmonicida, Francisella tularensis, Corynebacterium pseudotuberculosis, Citrobacter freundii, Chlamydia pneumoniae, Haemophilus somnus, Brucella abortus, Mycobacterium intracellulare, Legionella pneumophila, Rhodococcus equi, Pseudomonas aeruginosa, Helicobacter mustelae, Vibrio cholerae, Bacillus subtilis, Erysipelothrix rhusiopathiae, Yersinia enterocolitica, Rochalimaea quintana, and Agrobacterium tumefaciens.

[0075] Provided herein are genome modified bacteria, comprising genome modifications, whereby TLR2, TLR4, and TLR5 signaling is reduced compared to the bacteria without the genome modifications, wherein:

[0076] the bacteria comprise further genomic modifications whereby they are auxotrophic for a required nutrient or factor so that they are unable to replicate in a eukaryotic host, but can replicate in vitro when supplied with the nutrient or factor;

[0077] the bacteria comprise a plasmid containing nucleic acid, or comprise RNA encoding an antigenic sequence or sequences from a pathogenic virus, bacterium, or parasite, or encoding a tumor antigen, whereby, upon expression of the encoded antigen in the host, the host develops an immmunoprotective response against the pathogenic virus, bacterium, or parasite;

[0078] expression of the antigenic sequence(s) is/are under control of a prokaryotic promoter so that RNA encoding the antigen(s) is produced in the bacteria;

[0079] nucleic acid encoding the antigen comprises regulatory sequences that inhibit or prevent translation of encoded RNA by bacterial ribosomes, but that does not inhibit or prevent translation of the encoded RNA by eukaryotic host ribosomes, whereby translation is de-coupled from transcription in the bacteria;

[0080] the resulting bacteria infect phagocytic cells when administered to a eukaryotic subject, and deliver the nucleic acid into the phagocytic cells, wherein the RNA is translated.

[0081] The nucleic acid encoding the antigenic sequence(s) can comprise an internal ribosomal entry site (IRES) sequence, whereby host cell translation is facilitated or enhanced and bacterial translation is inhibited or prevented. The IRES can be Vascular Endothelial Growth Factor and Type 1 Collagen Inducible Protein (VCIP; see, e.g., SEQ ID NO:434), and the nucleic acid encoding the antigen(s) can comprise a VCIP IRES or other IRES that inhibits bacterial translation. The IRES or the VCIP IRES can be included in the plasmid, at a position that is 3′ of the promoter and 5′ of the antigen(s) coding sequence.

[0082] The pathogen can be a bacterium or a virus, or the encoded antigen can be a tumor antigen. The immunostimulatory bacteria provided herein can be vaccines to prevent or treat a viral infection or a bacterial infection, including chronic viral infections, and acute infections. The infection can be from an infection by hepatitis viruses, herpesviruses, varicella zoster virus (VZV), Epstein-Barr virus, human immunodeficiency virus (HIV), human T-cell leukemia virus (HTLV), Respiratory Syncytial Virus (RSV), measles virus, and other viruses that chronically infect subjects. The infectious agent can be Severe Acute Respiratory Syndrome coronavirus (SARS-CoV), Middle East Respiratory Syndrome coronavirus (MERS-CoV), or Severe Acute Respiratory Syndrome coronavirus 2 (SARS-CoV-2, which causes COVID-19).

[0083] The pathogen can be a species of Escherichia, Staphylococcus, Pseudomonas, or Porphyromonas, or the pathogen can be P. gingivalis, SARS-CoV, or E. coli.

[0084] The plasmid in these immunostimulatory bacteria can further encode an immunostimulatory protein or other adjuvant, or can encode a combination of immunostimulatory proteins or other therapeutic proteins. The immunostimulatory protein can be a STING protein, such as one that comprises a gain-of-function mutation, or one that is a chimeric STING protein. The bacteria can comprise a plasmid that encodes a combination of therapeutic products. The immunostimulatory protein(s) and/or other therapeutic proteins can be encoded on the plasmid as part of a polycistronic sequence, with the antigen under the control of a prokaryotic promoter recognized by the bacteria; or the immunostimulatory protein(s) and/or other therapeutic proteins can be encoded on the plasmid under control of a eukaryotic promoter recognized by the eukaryotic host. The prokaryotic promoter can be a bacterial promoter or a bacterial phage promoter, and the eukaryotic host can be a human.

[0085] The immunostimulatory bacteria can comprise mRNA encoding the antigen(s), and any other proteins expressed under control of a prokaryotic promoter, that are produced by culturing the bacterium in vitro. The immunostimulatory bacteria can comprise genome modifications whereby the bacteria lack flagella and produce LPS with pent-acylated, and/or the bacteria can be asd⁻, and/or an adenosine auxotroph, and/or csgD⁻ and/or ansB⁻.

[0086] The bacteria can comprise nucleic acid encoding a TLR8 agonist.

[0087] The bacteria can be msbB⁻/pagP⁻, and/or can lack flagella, and/or can be asd⁻.

[0088] The bacteria can be a species or strain of Escherichia, Listeria, or Salmonella. For example, the bacteria can be Salmonella typhimurium strains, and the unmodified Salmonella strain is a wild-type strain, or is an attenuated strain. The immunostimulatory bacteria can be derived from strain AST-100 (VNP20009 or YS1646), or from strain ATCC 14028, or from a strain having all of the identifying characteristics of strain ATCC 14028.

[0089] As described herein, the immunostimulatory bacteria can contain one or more genome modification that are one or more of a deletion, insertion, disruption, and other modification in a gene, whereby the product encoded by the gene is not produced or, as produced, is inactive.

[0090] Also provided herein are pharmaceutical compositions, comprising any of the immunostimulatory bacteria described or provided herein, in a pharmaceutically acceptable vehicle. The pharmaceutical composition can be formulated as a vaccine, for example, as a liquid, a powder, or a tablet. Also provided are methods and uses of the bacteria or pharmaceutical compositions for treating or prevent (reducing the risk of developing) a disease or condition or infection or cancer, as well as uses of the bacteria for delivering RNA, such as mRNA, and methods of delivering the RNA to a subject, comprising administering the bacteria herein.

[0091] Also provided are bacteria comprising a plasmid encoding a product or products, where the product(s) is/are a therapeutic product(s), and the plasmid in the bacterium encodes the product(s) to produce mRNA that is not translated by the bacterium.

[0092] The bacteria can be attenuated, or rendered of low toxicity or non-toxic, by virtue of the modifications described herein. Exemplary of bacteria are species of Salmonella, such as a Salmonella typhimurium strain. The immunostimulatory bacteria provided herein include those that endogenously encode and express, or are modified to encode and express, a gene encoding resistance to complement killing (rck), such as a Salmonella rck gene. For example, therapeutic E. coli are modified to encode rck so that they can be administered systemically. Also provided, as described herein, and as set forth in the claims, are delivery vehicles, cells, pharmaceutical compositions, methods, uses, and treatments of cancer, particularly in humans. Also provided are companion diagnostics and methods for selection of subjects for treatment, and methods for monitoring treatment. These are described below, and also, in the claims, which are incorporated in their entirety into this section.

### Immunostimulatory Bacteria and Vaccines

[0093] Provided are immunostimulatory bacteria that comprise a plasmid that encodes a therapeutic product; the bacteria comprise genome modifications, such as insertions, deletions, replacements, transposons, whereby the bacterium does not produce active thymidylate synthase, and requires supplementation for growth. Supplementation includes nutrients that can bypass the reactions catalyzed by thymidylate synthase so that the bacteria can replicate. Supplementation includes one or more of thymine, thymine derivatives, thymidine, thymidine derivatives, thymine precursor(s), thymidine precursor(s), or thymidine monophosphate precursor(s). The bacteria can additionally comprises additional modifications reduce or eliminate activation of TLR2, and optionally TLR4 and/or TLR5 in a host, such as a human or other mammal.

[0094] Also provided are immunostimulatory bacteria that comprise a plasmid that encodes a therapeutic product, where the bacterium comprises genome modifications, whereby the bacterium does not secrete active asparaginase; and the bacterium comprises genome modifications that reduce or eliminate activation of TLR2, and optionally TLR4 and/or TLR5 in a host.

[0095] These immunostimulatory bacteria additionally can include genome modifications, by deletion or disruption or modification of all or of a sufficient portion of the gene ansB encoding L-asparaginase II, whereby the bacterium is ansB⁻ and does not express active L-asparaginase II.

[0096] Also provided are immunostimulatory bacteria, comprising genome modification(s) that reduce or eliminate activation of TLR2, whereby induction of type I interferon (IFN) is not inhibited by TLR2, where: the immunostimulatory bacterium comprises genome modification(s) whereby it cannot replicate in vivo, but can replicate when grown in vitro with nutritional supplementation; and the genome modification(s) eliminate(s) or inactivate(s) thymidylate synthase, whereby the bacterium is thyA⁻ and/or asd⁻ or both.

[0097] It is described herein that activation of TLR2 can inhibit induction of type I IFN. It is shown herein that expression of a protein, such as a STING protein by a bacterium or delivery vehicle that activates TLR2, or TLR4/5 and TLR2, is not an advantageous combination since activation of the TLRs, such as TLR2, inhibits type I interferon. Type I IFN is, for example, an interferon-α and/or interferon-β.

[0098] Provided are immunostimulatory bacteria that comprise genome modifications whereby activation of TLR2 is reduced or eliminated, whereby induction of type I IFN is not inhibited by TLR2, wherein the immunostimulatory bacterium comprises a plasmid that encodes an interferon, or encodes a modified STING protein that constitutively induces type I interferon, and encodes an antigen or protein from a pathogen or tumor. These bacteria also can include genome modifications whereby TLR4 and/or TLR5 activation/induction is reduced or eliminated.

[0099] Provided are immunostimulatory bacteria that comprise a plasmid encoding a therapeutic product, where: the genome of the immunostimulatory bacterium is modified by deletion or disruption of all or of a sufficient portion of a gene or genes, whereby the bacterium has been modified to generate lipopolysaccharide (LPS) with penta-acylated lipid A; lipopolysaccharide with hexa-acylated lipid A is substantially reduced, by at least 10-fold, compared to the wild-type bacterium, or is absent; the genome of the bacterium is modified, whereby the bacterium itself does not inhibit or prevent induction of type I interferon (IFN) in an infected immune cell; and the genome of bacterium is modified to be auxotrophic for an essential nutrient. For example provided are immunostimulatory bacteria with genome modifications, whereby the bacterium does not encode or produce active asparaginase and/or thymidylate synthase. Any of the immunostimulatory bacteria provided herein can have genome modifications that comprise deletions, insertions, and/or replacements whereby the bacterium is thyA⁻ and/or asd⁻ or both thyA⁻ and asd⁻. Additionally, in some embodiments in which the bacteria are asd⁻ by virtue of genome modifications, the bacteria can include nucleic acid encoding asd⁻ on the plasmid such that it is expressed in vivo. The particular embodiments and applications for particular auxotrophies and complementation on the plasmid are described in the detailed description and/or known to those of skill in the art.

[0100] Also provided are immunostimulatory bacteria, comprising a plasmid encoding a therapeutic product, where: the genome of the immunostimulatory bacterium is modified by deletion or disruption or translocation of all or of a sufficient portion of a gene or genes, whereby the bacterium has been modified to generate lipopolysaccharide (LPS) with penta-acylated lipid A; lipopolysaccharide with hexa-acylated lipid A is substantially reduced, by at least 10-fold, compared to the wild-type bacterium, or is absent; and the genome of bacterium is modified whereby it does not produce active thymidylate synthase, whereby the bacterium is thyA⁻.

[0101] Also provided are immunostimulatory bacteria that comprise a plasmid encoding a therapeutic product, where: the genome of the immunostimulatory bacterium is modified by deletion or disruption of all or of a sufficient portion of a gene or genes, whereby the bacterium lacks flagella; the unmodified immunostimulatory bacterium has flagella; and the genome of the bacterium is modified, whereby it does not produce active thymidylate synthase.

[0102] Any of the immunostimulatory bacteria provided herein can have genome modifications, such as modifications that render the bacteria csgD⁻, whereby the bacteria lack curli fimbriae. Any of the immunostimulatory bacteria can comprises genome modifications that reduce or eliminate activation of TLR4 and/or TLR5. The immunostimulatory bacteria provided herein can comprise genome modifications that result in a bacterium that does not have flagella; and the wild-type of the bacterium has flagella. These bacteria further can have genome modification whereby they do not produce curli fimbriae. They also can comprise genome modifications that result in penta-acylated lipopolysaccharides. Thus, the bacteria provided herein can lack flagella and be msbB⁻/pagP⁻.

[0103] Provided herein are immunostimulatory bacteria, comprising genome modifications that reduce or eliminate activation of TLR2, whereby induction of type I IFN is not inhibited by TLR2, where: the immunostimulatory bacterium can replicate in vivo in a eukaryotic host; and the immunostimulatory bacterium comprises a plasmid that encodes a therapeutic product or products that include tumor-associated antigen, or encodes a tumor antigen and a product that is part of a cytosolic DNA/RNA sensor pathway that leads to expression of type I interferon (IFN), or the encoded product is a type I IFN that is interferon-alpha or is interferon-beta, or the encoded product is both IFN-alpha and IFN-beta, such as a STING protein, or encodes a tumor-associated antigen and interferon-alpha, or encodes a tumor-associated antigen and interferon-beta. Among the products that are part of the cytosolic DNA/RNA sensor pathway, such as a modified protein that results in increased induction of type I interferon, such as a STING protein that is a modified STING protein that has increased induction of type I interferon compared to the unmodified human STING protein. Modified STING proteins include, for example any described below, that result in increased or constitutive expression or induction of type I interferon, particularly compared to unmodified human STING protein. The modified STING proteins additionally can have reduced NF-κB signaling compared to wild-type human STING protein. Included are chimeric STING proteins as described herein (see, also International PCT Publication WO 2020/176809, and U.S. Publication No. 2020/0270613). For example, the STING protein is one that comprises replacements corresponding to N154S, R284G, or N154S/R284G, with reference to a human STING protein. Exemplary immunostimulatory bacteria are those that encode a modified STING protein that constitutively induces type I interferon and a tumor antigen and/or a cytokine, such as an IL-15 receptor complex. The immunostimulatory bacteria have genome modifications whereby the bacteria is/are flagellin deficient so that they do not have flagella and have penta-acylated LPS, such as by virtue of genome modifications that render the bacteria msbB⁻/pagP⁻. The bacteria also can lack curli fimbriae, such as by virtue of genome modifications that render them csgD⁻. The bacteria optionally are auxotrophic for a required nutrient, such as bacteria that are thyA⁻ and/or adenosine auxotrophs, or other such auxotrophy. The bacteria also can be ansB⁻. The particular combination of genome modifications, as described herein, depends upon the intended use of the bacteria and desired effects as does the particular selection of encoded therapeutic products. As described herein the promoters and other regulatory sequences that control expression of the encoded products also depends upon the intended use of bacteria. As described throughout the disclosure herein, the therapeutic proteins encoded on the plasmids can be under control of eukaryotic regulatory sequences, such as, for example, for anti-tumor therapy embodiments, or can be under control of bacterial promoters for embodiments, such as, for example, as certain vaccines in which the encoded proteins or RNA are intended for delivery

[0104] With respect to encoded products, that immunostimulatory bacteria can encode a therapeutic product that is part of a cytosolic DNA/RNA sensor pathway that leads to expression of type I interferon (IFN), or the encoded product is interferon-alpha or is interferon-beta, or the encoded product is both IFN-alpha and IFN-beta. Other products include cytokines, antibodies, bi-specific engager antibodies, and tumor antigens, or other antigens, such as pathogen antigens for vaccination. Exemplary of a therapeutic product that is part of a cytosolic DNA/RNA sensor pathway that leads to expression of type I interferon (IFN) is a STING protein, particularly one that is modified to have increased, particularly, constitutive activity, so that sensing of cytosolic DNA/RNA or the presence of such DNA/RNA is/are not required, nor is any ligand for such pathway. The plasmid can encode an antigen, epitope(s), or protein from a pathogen or a tumor.

[0105] Provided are immunostimulatory bacteria that comprise a plasmid encoding a combination of heterologous products, where: the genome of the immunostimulatory bacterium is modified by deletion or disruption of all or of a sufficient portion of a gene or genes, whereby the bacterium has attenuated recognition by TLR2, and optionally one or both of TLR4 and TLR5; one product is part of a cytosolic DNA/RNA sensor pathway that leads to expression of type I interferon (IFN); and a second product that is an antigen, an epitope or epitopes from its antigen, or is a protein for immunization against the pathogen or tumor. In some embodiments, the genome of the bacterium is modified whereby the bacterium does not have curli fimbriae.

[0106] Also provided are immunostimulatory bacteria, comprising nucleic acid operatively linked to a prokaryotic promoter, particularly where the nucleic acid is encoded on plasmid, where: the nucleic acid, which is expressed in the bacteria under control of the prokaryotic promoter, encodes RNA that lacks sequences necessary for translation by a prokaryote, whereby the RNA is produced in the bacterium. Exemplary of such are embodiments where the encoded RNA lacks a Shine-Dalgarno sequence, and/or comprises an Internal Ribosome Entry Site (IRES). The nucleic acid also can encode a translational read through 2A peptide so that discrete products are produced upon expression of the nucleic acid when the nucleic acid encodes a polycistronic message.

[0107] Provided are immunostimulatory bacteria, comprising nucleic acid, such as on a plasmid, operatively linked to a prokaryotic promoter, where the nucleic acid comprises RNA that lacks sequences necessary for translation by a prokaryote. As a result the bacteria can transcribe, but not translate the encoded RNA. The bacteria can then be used as RNA delivery vehicles. As noted, this can be achieved where the encoded RNA lacks a Shine-Dalgarno sequence. For polycistronic nucleic acid, the nucleic acid can comprise a 2A peptide, such as one or more of T2A, P2A, E2A, or F2A.

[0108] Provided are immunostimulatory bacteria, where the nucleic acid encoding a therapeutic product is operatively linked to a prokaryotic promoter; the nucleic acid encodes RNA that lacks sequences necessary for translation by a prokaryote, whereby the RNA is produced in the bacterium; the RNA lacks a Shine-Dalgarno sequence, and comprises an Internal Ribosome Entry Site (IRES), and/or can also include a translational read through 2A peptide. In some embodiments, the nucleic acid encoding the therapeutic product(s) can be operably linked to nucleic acid encoding a secretion signal, whereby, when expressed, the therapeutic product(s) is/are secreted.

[0109] Bacterial promoters for expression of encoded therapeutic products include any recognized by the bacterial or bacteriophage RNA polymerase, such as a bacterial promoter or a bacteriophage promoter. Where the promoter is one only recognized by a bacteriophage RNA polymerase, the bacteria can encode the bacteriophage polymerase, such as a T7 RNA polymerase. Exemplary promoters are any comprising any of SEQ ID NOs: 393-396, respectively:

attatgtcttgacatgtagtgagtgggctggtataatgcagcaag,
or
ttatgcttgacgctgcgtaaggtttttgttataatacaccaag,
or
attatgtcttgacatgtagtgagtgggctggtaaatgcagcaag,
or
(Salmonella rpsM promoter)
gatcccggagttcatgcgtgatgcaatgaaagtgccgttctacttcggtg
ggacctcactgcttatcgttgttgtcgtgattatggactttatggctcaa
gtgcaaactctgatgatgtccagtcagtatgagtctgcattgaagaaggc
gaacctgaaaggctacggccgttaattggtcgcctgagaagttacggaga
gtaaaaatgaaagttcgtgcttccgtcaagaaattatgccgtaactgcaa
aatcgttaagcgtgatggtgtcatccgtgtgatttgcagtgccgagccga
agcataaacagcgccaaggctgattttttcgcatatttttcttgcaaagt
tgggttgagctggctagattagccagccaatcttttgtatgtctgtacgt
ttccatttgagtatcctgaaaacgggcttttcagcatggtacgtacatat
taaatagtaggagtgcatagtggcccgtatagcaggcattaacattcctg
atcagaaacacgccgtgatcgcgttaacttcgatctacggtgtcggcaag
acccgttctaaagccatcctggctgcagcgggtatcgctgaaaatgttaa
gatcctctagatttaagaaggagatatacat.

[0110] The immunostimulatory bacteria include genome modifications, such as elimination of flagella and/or other modifications so that the bacteria do not infect epithelial cells, but still infect or accumulate in or preferentially infect (infect to a greater extent or amount than the unmodified bacteria, and infect other cells types to lesser extent or amount than the unmodified bacteria) phagocytic cells, such as tumor-resident myeloid cells in subjects with tumors, and tissue-resident myeloid cells, such at or near the site of vaccination when the bacteria are vaccines. Such bacteria include those that contain genome modifications so that, for bacteria that have flagella, the modifications render the bacterial flagellin deficient so that the bacteria lack flagella.

[0111] Immunostimulatory bacteria provided herein include those that comprise a plasmid encoding a therapeutic product, where infection of a macrophage by the bacterium converts an macrophage to an M1 or M1-like phenotype macrophage. The encoded therapeutic product can be a therapeutic product that is part of a cytosolic DNA/RNA sensor pathway that leads to expression of type I interferon (IFN), such as one that modified so that expression of the type I IFN is constitutive. The therapeutic product can be one that is a gain-of-function (GOF) variant of the therapeutic product that is part of the cytosolic DNA/RNA sensor pathway, wherein the variant GOF product does not require cytosolic nucleic acids, nucleotides, dinucleotides, or cyclic dinucleotides to result in expression of type I IFN. Exemplary of such products is a modified or variant STING protein. Infection by such bacteria can convert human M2 macrophages into M1-like type I IFN producing cells. Exemplary of such bacteria are those that lack flagella, where the wild-type bacterium has flagella, and are pagP⁻/msbB⁻. Thus, provided are methods for converting an M2 macrophage into one with an M1 or M1-like phenotype by introducing or infecting the M2 macrophage with a immunostimulatory bacterium that lacks flagella and has penta-acylated LPS, such as a bacterium that is msbB⁻/pagP⁻, and that encodes a be a therapeutic product that is part of a cytosolic DNA/RNA sensor pathway that leads to expression of type I interferon (IFN), such as one that modified so that expression of the type I IFN is constitutive, such as the variant or modified STING proteins as described herein, including those that result in constitutive type I IFN expression. Exemplary of such bacteria are those that are a Salmonella strain species or type.

[0112] The immunostimulatory bacteria can encode therapeutic products on the plasmid, such therapeutic products include an anti-cancer therapeutics, which include any product that is used for or in connection or conjunction with a cancer treatment. The therapeutic products also include products that are used for or in connection or conjunction with treatments for a pathogen, such as a viral, bacterial, yeast, or parasitic pathogen. The products can be an anti-viral therapeutics and/or an anti-pathogenic bacterial therapeutics. It is understood that some therapeutic products are used for treatment of a variety of indications; for example, an anti-cancer product can also be effective or used for treatment of viral infections. Anti-virals include vaccines, and therapeutic products that inhibit a viral enzyme or inhibit viral replication. Therapeutics include the anti-viral therapeutics, such as a viral antigen whose expression results in an immune-protective response against a virus, and antibodies that binds to and/or interact with a viral antigen, whereby a virus is inhibited or blocked, or anti-viral immunity results. Other therapeutics are anti-bacterial therapeutics, such as bacterial antigens whose expression results in an immune-protective response against the bacterial pathogen, and/or antibodies that bind to or interact with a bacterial antigen, whereby the pathogenic bacterium is inhibited or blocked, or anti-pathogenic bacterium immunity results. Antivirals encoded by the bacteria include anti-viral therapeutics for treating a virus or infectious agent that causes persistent infection. Exemplary of anti-viral therapeutics are viral antigens or epitopes of an antigen, such as, but not limited to, a viral surface protein, or a viral nucleocapsid protein, or a viral nonstructural protein, or a virus open reading frame protein, such as, for example, embodiments in which a therapeutic product is a viral surface antigen or portion thereof sufficient to produce an immune response in a host, and embodiments in which the therapeutic product interferes with viral gene expression or replication.

[0113] The virus or other infectious agent or pathogen can be one that causes chronic infection, and/or latent infection, and/or slow infection. Exemplary of viral pathogens are a virus or infectious agent selected from among T-Cell leukemia viruses, Epstein-Barr virus, cytomegalovirus, herpesviruses, varicella zoster virus, measles virus, papovaviruses, prions, hepatitis virus type A, B, C, D and E, adenoviruses, parvoviruses, human immunodeficiency virus (HIV), coronaviruses, smallpox virus, poliovirus, influenza virus, rotavirus, yellow fever virus, mumps virus, rubella virus, and papillomaviruses, such as a HIV or hepatitis virus. Other infectious agents include prions and protozoans.

[0114] Therapeutic products encoded by the immunostimulatory bacteria include immunostimulatory proteins, such as the aforementioned Stimulator of Interferon Genes (STING) protein, a modified STING protein, a cytokine, a chemokine, or a co-stimulatory receptor or ligand. The immunostimulatory bacteria include those that comprise a genomic modification whereby the bacteria lack flagella, and/or are pagP⁻ or msbB⁻/pagP⁻. The products include immunostimulatory proteins that confer or contribute to anti-tumor immunity in the tumor microenvironment such as a cytokine or a chemokine.

[0115] The immunostimulatory bacteria include any described herein and that also comprise genomic modification whereby they do not express asparaginase or activate the synthesis of secreted asparaginase; and/or the genome of the immunostimulatory bacterium is modified by deletion or disruption of all or of a sufficient portion of the gene ansB encoding L-asparaginase II, whereby the bacterium is ansB⁻ and does not express active L-asparaginase II. Such bacteria can encode any therapeutic product of interest, including any provided or described herein, whereby the resulting bacterium is an anti-cancer therapeutic that colonizes tumors and/or the tumor microenvironment, whereby the ansB⁻ phenotype reduces or eliminates production of active asparaginase

[0116] Provided herein are immunostimulatory bacteria, comprising nucleic acid operatively linked to a prokaryotic promoter, where: the nucleic acid comprises RNA that lacks sequences necessary for translation by a prokaryote, whereby the RNA is produced in the bacterium, but cannot be translated by the bacterium; the bacterium has genomic modifications whereby infection is restricted to myeloid cells; and the RNA encodes a therapeutic product or is a therapeutic product.

[0117] Provided herein are is an RNA delivery system, comprising an immunostimulatory bacterium that primarily or solely infects myeloid cells and that comprises RNA encoded by the bacterium under control of a prokaryotic promoter, where: the RNA lacks regulatory sequences necessary for translation by the bacterium; and the RNA encodes a therapeutic product or is a therapeutic product. As discussed, the transcribed RNA lacks a Shine-Dalgarno sequence or include or lack other sequences so that it is not translated by bacterial ribosomes, but is translated by eukaryotic ribosomes in a host. The RNA can comprise a Kozak consensus sequence, such as, for example, where a Kozak consensus sequence is ACCAUGG (SEQ ID NO: 397). The immunostimulatory bacteria of includes those that lack flagella and are msbB⁻/pagP⁻. In the RNA delivery systems, the bacteria can contain a plasmid that encodes the therapeutic product or products. In some embodiments, the nucleic acid encoding the therapeutic product(s) is operatively linked to a prokaryotic promoter that is inducible or one that is constitutive. The encoding nucleic acid can comprises nucleic acid encoding an Internal Ribosome Entry Site (IRES) or other sequence so that the transcribed RNA is not translated by bacterial ribosomes but is translated by eukaryotic ribosomes. As a result the bacteria encode and produce RNA encoding any therapeutic protein, such as an antigen and other payload, but does not translate the RNA. The RNA is translated after administration of the bacteria to a host, such as a human, where, for example, the enter phagocytic cells, where the RNA can be translated.

[0118] Provided are immunostimulatory bacteria and RNA delivery system where the genome of the immunostimulatory bacterium is modified by deletion or disruption or other change of all or of a sufficient portion of the gene ansB, encoding L-asparaginase II, whereby the bacterium is ansB⁻ and does not express active L-asparaginase II. The immunostimulatory bacteria and RNA delivery systems can further contain modification(s) of the genome, such as by deletion or disruption or mother change of all or of a sufficient portion of the gene csgD, whereby the bacterium is ansB⁻ and does not express active L-asparaginase II, and is csgD⁻ and does not activate the synthesis of curli fimbriae and/or the bacteria can include further modification(s) of the genome whereby biofilm formation is impaired. These bacteria and RNA delivery systems can further include genome modifications whereby the bacteria is flagellin⁻ and does not produce flagella, where the wild-type bacterium has flagella. Hence, for example, the immunostimulatory bacterium or RNA delivery system has genome modifications, whereby the bacterium is csgD⁻/msbB⁻/pagP⁻, and the bacterium or RNA delivery system also can include genome modifications, whereby the bacterium lacks flagella. Other genome modifications can be included, whereby the bacterium lacks flagella, and is lppA⁻/lppB⁻, and optionally is csgD⁻. Any of the immunostimulatory bacteria and RNA systems described herein can be auxotrophic for a nutrient, such as purines, such as auxotrophy for adenosine and/or for all or any of adenosine, adenine, and ATP. Adenosine auxotrophy is advantageous for bacteria that accumulate in the tumor microenvironment or tumor-resident macrophage; adenosine accumulation occurs in the tumor microenvironment. The bacteria provided herein can include additional genome modifications, including those whereby the bacterium is purI⁻, including by complete deletion of the gene, and/or is pagP⁻ and/or is asd⁻ or thyA⁻ or both.

[0119] The immunostimulatory bacteria provided herein can be aspartate-semialdehyde dehydrogenase⁻ (asd⁻), where the bacterium is asd⁻ by virtue of disruption of or deletion or transposition or other modification of all or a portion of the endogenous gene encoding aspartate-semialdehyde dehydrogenase (asd), whereby endogenous asd is not expressed or functional enzyme is not produced, or is thyA⁻ by virtue of the disruption of or deletion of all or a portion of the endogenous gene or genes, whereby endogenous thymidylate synthase is not expressed or functional enzyme is not produced. Hence provided are immunostimulatory bacteria that are aspartate-semialdehyde dehydrogenase⁻ (asd⁻), where: the bacterium is asd⁻ by virtue of disruption of or deletion of all or a portion of the endogenous gene encoding aspartate-semialdehyde dehydrogenase (asd), whereby endogenous asd is not expressed or functional enzyme is not produced; and the bacterium is thyA⁻ by virtue of the disruption of or deletion of all or a portion of the endogenous gene or genes, whereby endogenous thymidylate synthase is not expressed or functional enzyme is not produced. The immunostimulatory bacteria can encodes aspartate-semialdehyde dehydrogenase (asd) on the plasmid under control of a bacterial promoter so that the asd can be produced in vivo. Exemplary of the immunostimulatory bacteria provided are those where the unmodified bacterium is a Salmonella bacterium.

[0120] The immunostimulatory bacterium provided herein can be msbB⁻ by virtue of genome modifications, including, but not limited to, complete or partial deletion of the gene locus. Full deletion results in bacteria that grow better than those that retain part of the gene.

[0121] The bacteria provided herein are immunostimulatory bacteria that are asd⁻, purI⁻, msbB⁻, flagellin⁻ and pagP⁻; or any immunostimulatory bacteria described above or herein that are asd⁻, csgD, purI⁻, msbB, flagellin⁻ and pagP⁻; or thyA⁻, csgD⁻, purI⁻, msbB⁻, flagellin⁻ and pagP⁻; or ansB⁻, asd⁻, csgD⁻, purI⁻, msbB⁻, flagellin⁻ and pagP⁻; or ansB⁻, thyA⁻, csgD⁻, purI⁻, msbB⁻, flagellin⁻ and pagP⁻, or are ansB⁻, thyA⁻, csgD⁻, purI⁻, msbB⁻, flagellin⁻ and pagP⁻.

[0122] The immunostimulatory bacteria encode therapeutic products, such as but not limited to, anti-cancer therapeutics and/or therapeutics for treating diseases, disorders, and conditions caused by pathogens or other diseases, disorders, and conditions. Exemplary encoded products include, but are not limited to combinations of products, such as a modified STING and IL-15 or IL-15/IL-15R alpha chain complex, where the STING constitutively induces type I IFN in the absence of cGAS and/or any STING ligands.

[0123] Provided are the immunostimulatory bacteria as described herein that encode a therapeutic product that is an anti-viral product, such as, for example, a viral antigen and/or an anti-viral antibody. Viruses include, for example, viruses that cause chronic infections or latent infections, such as, but not limited to, a hepatitis virus, a herpes virus, a varicella zoster virus, a poxvirus, a measles virus, and a retrovirus.

[0124] In the immunostimulatory bacterium the copy number of the plasmids is from low to high. In some embodiments, the copy number is from low to medium, such as where number of copies of the plasmid is less than 150. In other embodiments the copy number is from 150 or is greater than 150. Hence in embodiments, the number of copies of the plasmid is 150 copies or fewer, or is less than or equal to 150. In other embodiments, the plasmid is present in low copy number, and low copy number is less than 25 or less than 20 or less than about 25 or less than about 20 copies, typically less than 25.

[0125] The encoded therapeutic products include, proteins and also nucleic acids, such as RNA products, antigens, antibodies. The plasmid can encode two or more products. Exemplary products are any that are used in the treatment of cancer. Also included are produces used as anti-viral treatment(s). For example, the bacteria can encode two or more products selected from among a cytokine, a protein that constitutively induces a type I IFN, and a co-stimulatory receptor or molecule. The co-stimulatory molecule can be modified so that it lacks a cytoplasmic domain. The products can have complementary activities; in some embodiments the activities are synergistic. The nucleic acid encoding one or more of the therapeutic product or products comprises nucleic acid that can encode a signal for secretion of the therapeutic product(s) from a cell comprising the bacterium. The nucleic acid encoding the product on the plasmid can be operatively linked to regulatory sequences recognized by a eukaryotic host. In embodiments, in which the immunostimulatory bacterium encodes two or more products, expression of each product can be under control of a separate promoter, or expression of all two or more can be under control of a single promoter, such as where nucleic acid encoding each product is separated by nucleic acid encoding a 2A peptide to effect separate translation of each encoded therapeutic product. Exemplary 2A peptides, include T2A, F2A, E2A, or P2A peptide, which effect separate expression of therapeutic products expressed under control of a single promoter. Eukaryotic regulatory signals can control expression of the produce or products. Eukaryotic promoters include RNA polymerase II promoters and RNA polymerase III promoters. Eukaryotic RNA polymerase II promoters include viral promoters from viruses that infect eukaryotes, and mammalian RNA polymerase II promoters. Exemplary promoters include, but are not limited to, viral promoters, such as a cytomegalovirus (CMV) promoter, an SV40 promoter, an Epstein Barr virus (EBV) promoter, a herpes virus promoter, and an adenovirus promoter; an elongation factor-1 (EF-1) alpha promoter, or an MND promoter, or a UBC promoter, or a PGK promoter, or a CAG promoter, such as an EF-1 alpha, an adenovirus 2 or 5 late, a CMV, an SV40, an MND, a PGK, an EIF4A1, a CAG, or a CD68 promoter. Viral promoters include those that are late promoters. The immunostimulatory bacteria include those where the plasmid comprises regulatory sequences that comprise a terminator and/or promoter(s) selected from among SV40, hGH, BGH, MND, chicken beta-globulin, and rbGlob (rabbit globulin) genes, to control expression of the therapeutic product(s). The encoded therapeutic product(s) can be operatively linked to a signal sequence for secretion from a cell containing the plasmid; or in some embodiments can be designed or modified to be expressed on the surface of the cell in which they are produced. The plasmid that encodes the therapeutic product(s) can comprises a nucleic acid construct that includes an enhancer, a promoter, the open reading frame encoding the therapeutic product or heterologous protein, and a polyA tail. Exemplary of the plasmids in the bacteria are those where the plasmid comprises a construct that includes an enhancer, a promoter, an IRES, the open reading frame encoding the therapeutic product or heterologous protein, and a polyA tail, and those where the plasmid comprises a construct that includes an enhancer, a promoter, an IRES, a localization sequence, the open reading frame encoding the therapeutic product or heterologous protein, and a polyA tail. The constructs can include posttranscriptional regulatory elements, such as a Woodchuck Hepatitis Virus (WHP) Posttranscriptional Regulatory Element (WPRE), or a Hepatitis B virus Posttranscriptional Regulatory Element (HPRE).

[0126] The bacteria provided herein contain plasmids that encode a therapeutic product that is part of a cytosolic DNA/RNA sensor pathway that leads to expression of type I interferon (IFN), or a variant of the therapeutic product. These products can be modified to have increased or constitutive activity for expression of type I IFN. These products in unmodified form sense or interact directly or indirectly with cytosolic nucleic acids, nucleotides, dinucleotides, or cyclic dinucleotides, to induce expression of type I IFN, and the variant or modified protein induces expression of type I IFN in the absence of the sensing or interacting with the cytosolic nucleic acids, nucleotides, dinucleotides, or cyclic dinucleotides so that in the therapeutic product is a variant that, when expressed in a subject, leads to constitutive expression of type I IFN. Mutations in the variant proteins include those that result in a gain-of-function so that the variant that does not require cytosolic nucleic acids, nucleotides, dinucleotides, or cyclic dinucleotides, or ligands, to result in expression of type I IFN. These products that are part of a cytosolic DNA/RNA sensor pathway that leads to expression of type I interferon (IFN) include, but are not limited to, STING, RIG-I, MDA-5, IRF-3, IRF-5, IRF-7, IRF-8, TRIM56, RIP1, Sec5, TRAF3, TRAF2, TRAF6, STAT1, LGP2, DDX3, DHX9, DDX1, DDX9, DDX21, DHX15, DHX33, DHX36, DDX60, and SNRNP200, such as STING, RIG-I, IRF-3, IRF-5, IRF-8, or MDA5, particularly variants of these proteins that have increased activity, or that results in constitutive expression of type I interferon (IFN). Mutations include those that, in humans, promotes or causes interferonopathies. Other mutations in these proteins include mutations that eliminate a phosphorylation site in the protein to thereby reduce nuclear factor kappa-light-chain-enhancer of activated B cell (NF-κB) signaling, and combinations of mutations. Provided are immunostimulatory bacteria, where the therapeutic product is a variant thereof that has increased activity or constitutive activity; and the therapeutic product is STING, RIG-I, IRF-3, IRF-5, IRF-8, or MDA5, such as, for example, where the therapeutic product is a variant of STING, RIG-I, IRF-3, IRF-5, IRF-8, or MDA5 that comprises a gain-of-function mutation resulting in increased or constitutive expression of type I IFN, and optionally mutations or replacements of the C-terminal tail (CTT) resulting in decreased NF-κB signaling activity, such as where the therapeutic product is a variant of STING, RIG-I, IRF-3, IRF-5, IRF-8, or MDA5 in which one or more serine (S) or threonine (T) residue(s) that is/are phosphorylated as a consequence of viral infection, is/are replaced with an aspartic acid (D), whereby the resulting variant is a phosphomimetic that constitutively induces type I IFN. Exemplar thereof is where

[0127] The therapeutic product is IRF-3 that has one or more replacement(s) at residues at positions 396, 398, 402, 404 and 405, with reference to SEQ ID NO:312; and the residues are replaced with aspartic acid residues, such as an IRF-3 that comprises the replacement S396D with reference to SEQ ID NO:312, such as, for example, where IRF-3 comprises the replacements S396D/S398D/S402D/T404D/S405D with reference to SEQ ID NO:312. Other examples, include where the therapeutic product that senses cytosolic DNA/RNA is a variant STING, MDA5, RIG-I or IRF-3; and unmodified STING has the sequence set forth in any of SEQ ID NOs: 305-309, unmodified MDA5 has the sequence set forth in SEQ ID NO: 310, unmodified RIG-I has the sequence set forth in SEQ ID NO: 311, and unmodified IRF-3 has the sequence set forth in SEQ ID NO: 312. In other examples, the therapeutic product is selected from among STING, MDA5, IRF-3, and RIG-I, and comprises a gain-of-function mutation(s) that renders the STING, MDA5, IRF-3, IRF-5, IRF-8, or RIG-I constitutively active, whereby expression of type I IFN is constitutive. Mutations can be selected as follows:

[0128] a) in STING, with reference to SEQ ID NOs: 305-309, one or more selected from among: S102P, V147L, V147M, N154S, V155M, G166E, C206Y, G207E, S102P/F279L, F279L, R281Q, R284G, R284S, R284M, R284K, R284T, R197A, D205A, R310A, R293A, T294A, E296A, R197A/D205A, S272A/Q273A, R310A/E316A, E316A, E316N, E316Q, S272A, R293A/T294A/E296A, D231A, R232A, K236A, Q273A, S358A/E360A/S366A, D231A/R232A/K236A/R238A, S358A, E360A, S366A, R238A, R375A, N154S/R284G, and S324A/S326A;

[0129] b) in MDA5, with reference to SEQ ID NO:310, one or more of: T331I, T331R, A489T, R822Q, G821S, A946T, R337G, D393V, G495R, R720Q, R779H, R779C, L372F, and A452T;

[0130] c) in RIG-I, with reference to SEQ ID NO:311, one or both of E373A and C268F; and

[0131] d) in IRF-3, with reference to SEQ ID NO:312, S396D; and

[0132] e) conservative replacements of any of the above. For example, where the therapeutic product is a variant STING protein that contains one or more amino replacement(s) selected, with reference to SEQ ID NOs: 305-309, from among: S102P, V147L, V147M, N154S, V155M, G166E, C206Y, G207E, S102P/F279L, F279L, R281Q, R284G, R284S, R284M, R284K, R284T, R197A, D205A, R310A, R293A, T294A, E296A, R197A/D205A, S272A/Q273A, R310A/E316A, E316A, E316N, E316Q, S272A, R293A/T294A/E296A, D231A, R232A, K236A, Q273A, S358A/E360A/S366A, D231A/R232A/K236A/R238A, S358A, E360A, S366A, R238A, R375A, N154S/R284G, and S324A/S326A, and conservative replacements thereof.

[0133] Encoded therapeutic products include, for example, antibodies, of any form known to those of skill in the art, and includes multi-specific, such as bi-specific antibodies, such as, for example, where the bi-specific antibody is a bi-specific T-cell engager, such as where a plasmid in the bacterium encodes a bi-specific T-cell engager antibody that binds DLL3 and CD3, such as a bi-specific T-cell engager antibody that comprises a heavy chain and light chain of an anti-DLL3 antibody and of an anti-CD3 antibody, such has those encoded in the constructs designated SC16.15, SC16.34, and SC16.56, which encode variable heavy and variable light chains of antibodies that bind each of DLL3 and CD3, and whose sequences are set forth in SEQ ID NOs:485-491, or humanized variants thereof, and variants that have at least 95% or 98% sequence identity thereto. For example, the encoded bi-specific T-cell engager antibody comprises combinations of a)-f), whereby the resulting construct can bind to each of DLL3 and CD3:

[0134] a) a light chain that comprises amino acid residues 154-260 of SEQ ID NO: 487, or a humanized variant thereof, or a variant having at least 95% sequence identity thereto; and

[0135] b) a heavy chain that comprises the sequence of amino acid residues set forth as amino acid residues 22-138 of SEQ ID NO: 487, or a humanized variant thereof, or a variant having at least 95% sequence identity thereto; and

[0136] c) a light chain that comprises a sequence of amino acid residues set forth as amino acid residues 155-261 of SEQ ID NO: 489, or a humanized variant thereof, or a variant having at least 95% sequence identity thereto; and

[0137] d) a heavy chain that comprises a sequence of amino acid residues set forth as amino acid residues 22-139 of SEQ ID NO: 489, or a humanized variant thereof, or a variant having at least 95% sequence identity thereto; and

[0138] e) a heavy and light chain, wherein:
[0139] the light chain comprises a sequence of amino acid residues set forth as amino acid residues 155-261 of SEQ ID NO: 485, or a humanized variant thereof, or a variant having at least 95% sequence identity thereto; and
[0140] the heavy chain comprises a sequence of amino acid residues set forth as amino acid residues 22-139 of SEQ ID NO: 485, or a humanized variant thereof, or a variant having at least 95% sequence identity thereto; and

[0141] f) a heavy and light chain of an anti-CD3 antibody, wherein:
[0142] the light chain of the anti-CD3 antibody comprises a sequence of amino acid residues set forth as amino acid residues 398-504 of SEQ ID NO: 485, or a humanized variant thereof, or a variant having at least 95% sequence identity thereto, or a humanized variant thereof, or a variant having at least 95% sequence identity thereto; and
[0143] the heavy chain of the anti-CD3 antibody comprises a sequence of amino acid residues set forth as amino acid residues 267-382 of SEQ ID NO: 485, or a humanized variant thereof, or a variant having at least 95% sequence identity thereto. The encoded bi-specific T-cell engager antibody construct can comprise a leader sequence, such as, for example, an IgGK leader sequence. The bispecific antibody also can comprise a Gly-Ser linker linking one or more light and heavy chains; and also can comprise a linker, such as a Gly-Ser linker, linking the portions that bind different targets, such as a Gly-Ser linker linking the anti-DLL3 and anti-CD3 portions of an exemplary bi-specific T-cell engager antibody. An exemplary linker comprises the sequence of amino acids set forth as residues 383-397 of SEQ ID NO: 485 and variants thereof. The bi-specific T-cell engager antibody can comprise a flag tag, such as, for example, a flag tag that comprises the sequence of amino acids set forth as residues 505-512 of SEQ ID NO: 485. Exemplary of constructs that encode a bi-specific T-cell engager antibody is a nucleic acid construct encoding a leader sequence, the heavy and light chain of an anti-DLL antibody, and the heavy and light chain of an anti-CD3 antibody, and optionally one or more peptide linkers, and optionally a flag tag, such as, for example, where the encoded bi-specific T-cell engager antibody construct comprises the sequence of amino acid residues set forth in any of SEQ ID NOs: 485-491, or a humanized variant thereof, or a variant having at least 95% sequence identity thereto, and sequences having at least 95% or 98% sequence identity thereto, and retaining the bi-specific binding

[0144] Another example of a therapeutic product that can be encoded in the plasmid of the immunostimulatory bacteria provided is/are tumor-associated antigen(s). These plasmids can encode another therapeutic product, such as a protein that is part of a cytosolic DNA/RNA sensor pathway that leads to expression of type I interferon (IFN) part of a cytosolic DNA/RNA sensor pathway that leads to expression of type I interferon (IFN), such as, for example, a modified STING protein that constitutively induces type I interferon. Exemplary of such STING proteins is a modified STING protein that comprises the replacements corresponding to N154S, or R284G, or N154S/R284G. These include human STING, non-human STING that has a lower NF-κB signaling activity compared to human STING, and the chimeric STING proteins that comprise a CTT from a non-human STING with lower NF-κB activity than human STING. The plasmids also can encode a cytokine, that, for example, has anti-tumor r anti-viral activity, such as IL-15 or an IL-15/IL-15R alpha chain complex. The plasmid can encoded the combination of a modified STING, IL-15/IL-15R alpha chain complex, or the modified STING, IL-15, and a tumor-associated antigen and/or a bi-specific T-cell engager antibody. Other encoded therapeutic products include an immunostimulatory protein(s) that confers or contributes to an anti-tumor immune response in the tumor microenvironment that is selected from among one or more of: IL-2, IL-7, IL-12p70 (IL-12p40+IL-12p35), IL-15, IL-2 that has attenuated binding to IL-2Ra, IL-15/IL-15R alpha chain complex (IL-15Rα-IL-15sc), IL-18, IL-21, IL-23, IL-367, IL-2 that is modified so that it does not bind to IL-2Ra, CXCL9, CXCL10, CXCL11, interferon-α, interferon-β, interferon-γ, CCL3, CCL4, CCL5, proteins that are involved in or that effect or potentiate recruitment and/or persistence of T cells, CD40, CD40 ligand (CD40L), CD28, OX40, OX40 ligand (OX40L), 4-1BB, 4-1BB ligand (4-1BBL), members of the B7-CD28 family, CD47 antagonists, an anti-IL-6 antibody or IL-6 binding decoy receptor, TGF-beta polypeptide antagonists, and members of the tumor necrosis factor receptor (TNFR) superfamily. Other immunostimulatory proteins that can be encoded are co-stimulatory molecules selected from among CD40, CD40 ligand (CD40L), CD28, OX40, OX40 ligand (OX40L), 4-1BB, and a 4-1BB ligand (4-1BBL) that optionally is truncated and lacking a cytoplasmic domain for expression on an antigen-presenting cell (APC); and where the truncated gene product is capable of constitutive immunostimulatory signaling to a T-cell through co-stimulatory receptor engagement and is unable to counter-regulatory signal to the antigen-presenting cell (APC) due to a deleted cytoplasmic domain. Other immunostimulatory proteins that confer or contribute to an anti-tumor immune response in the tumor microenvironment is an immunostimulatory protein that confers or contributes to an anti-tumor immune response in the tumor microenvironment is a cytokine, a chemokine, and/or a co-stimulatory molecule, such as cytoplasmic domain-deleted form thereof, such as one or more of 4-1BBL, CD80, CD86, CD27L, CD24L, B7RP1, and OX40L. Other therapeutic products include, for example, TGF-beta polypeptide antagonists. Other therapeutic products are antibodies or antibody or antigen-binding fragments or forms thereof, such as, but not limited to, a Fab, Fab′, F(ab′)₂, single-chain Fv (scFv), Fv, dsFv, nanobody, diabody fragment, and a single-chain antibody. The antibody or antigen-binding fragment thereof can be humanized or human. Exemplary of antibody and antigen binding fragments is an antagonist of PD-1, PD-L1, CTLA-4, VEGF, VEGFR2, CD24, or IL-6.

[0145] The immunostimulatory bacterium can contain a plasmid that encodes two or more therapeutic products selected from among: a) an immunostimulatory protein that confers or contributes to an anti-tumor immune response in the tumor microenvironment; b) one or more of a protein that is part of a cytosolic DNA/RNA sensor pathway that leads to expression of type I interferon (IFN), or a variant thereof that has increased activity to increase expression of type I IFN, or a variant thereof that results in constitutive expression of a type I IFN; and c) an anti-cancer antibody or antigen-binding portion thereof. In some embodiments, the immunostimulatory protein is a co-stimulatory molecule that lacks a cytoplasmic domain or a sufficient portion thereof, for expression on an antigen-presenting cell (APC), whereby the truncated co-stimulatory molecule is capable of constitutive immunostimulatory signaling to a T-cell through co-stimulatory receptor engagement and is unable to counter-regulatory signal to the antigen presenting cell (APC). In some embodiments, the immunostimulatory bacteria comprise plasmid that encodes two or more therapeutic products under control of a single promoter, where the therapeutic products are selected from among: a) an immunostimulatory protein that confers or contributes to an anti-tumor immune response in the tumor microenvironment; b) one or more of a protein that is part of a cytosolic DNA/RNA sensor pathway that leads to expression of type I interferon (IFN), or a variant thereof that has increased activity to increase expression of type I IFN, or a variant thereof that results in constitutive expression of a type I IFN; and c) an anti-cancer antibody or antigen-binding portion thereof; and where the encoding nucleic acids are separated by an IRES sequence or 2A peptides, and each nucleic acid encoding each product is optionally operatively linked to nucleic acid encoding a signal sequence, whereby, upon translation of the encoded mRNA, each product is separately expressed and secreted from a cell comprising the bacterium and/or plasmid. Where the immunostimulatory protein is a co-stimulatory molecule, it can lack a cytoplasmic domain or a sufficient portion thereof, for expression on an antigen-presenting cell (APC), whereby the truncated co-stimulatory molecule is capable of constitutive immunostimulatory signaling to a T-cell through co-stimulatory receptor engagement and is unable to counter-regulatory signal to the antigen presenting cell (APC). For example, the immunostimulatory bacteria um of any of claims 1-186, wherein the plasmid encodes at least two therapeutic products selected from among a cytokine, a protein that constitutively induces a type I IFN, a co-stimulatory molecule, and an anti-cancer antibody or antigen-binding portion thereof. The immunostimulatory bacteria can comprise a plasmid that encodes at least two therapeutic products selected, for example, from among two or more or all of a cytokine, a protein that constitutively induces a type I IFN, a co-stimulatory molecule, and an anti-cancer antibody or antigen-binding portion thereof, and also encodes an antigen or an antigenic protein, such as one that results in an immune response against a tumor and/or a pathogen. The antigen or antigenic protein can be, for example, a tumor-associated antigen. Examples of tumor-associated antigens and proteins include, but are not limited to, an oncofetal antigen, an oncoviral antigen, and overexpressed/accumulated antigen, a cancer-testis antigen, a linear restricted antigen, a mutated antigen, a post-translationally altered antigen, or an idiotypic antigen. Exemplary of such antigens and proteins are the following:

| Category of Tumor- | |
|---|---|
| Associated Antigen | |
| (TAA) | Name/Family Name of TAA |
| Oncofetal | Carcinoembryonic antigen (CEA) |
| | Immature laminin receptor |
| | Tumor-associated glycoprotein 72 (TAG-72) |
| Oncoviral | HPV E6, HPV E7 |
| Overexpressed | BING-4 |
| Accumulated | Epidermal Growth Factor Receptor (EGFR) |
| | Wilms' Tumor Protein |
| | Calcium-activated chloride channel 2 |
| | Cyclin-B1 |
| | 9D7 |
| | Epithelial cell adhesion molecule (EpCAM) |
| | Ephrin type-A receptor 3 (EphA3) |
| | Human epidermal growth factor receptor 2 |
| | (HER2/Neu) |
| | Telomerase |
| | Mesothelin |
| | Stomach-cancer-associated protein tyrosine |
| | phosphatase 1 (SAP-1) |
| | Survivin |
| Cancer-Testis | BAGE (B melanoma antigen) family |
| | CAGE family |
| | GAGE family |
| | MAGE (melanoma antigen) family |
| | SAGE (sarcoma antigen) family |
| | PAGE family |
| | XAGE family |
| | CT9, CT10 |
| | New York esophageal squamous cell |
| | carcinoma 1 (NY-ESO-1), LAGE-1 |
| | Preferentially expressed antigen in |
| | melanoma (PRAME) |
| | synovial sarcoma/X breakpoint 2 (SSX-2) |
| Lineage- | Melanoma antigen recognized bv T-cells 1 |
| Restricted | (Melan-A/MART-1) |
| | gp100/Pmel17 |
| | Tyrosinase |
| | Tyrosinase related protein (TRP)-1, TRP-2 |
| | P. polypeptide (pancreatic polypeptide) |
| | Melanocortin 1 receptor (MC1R) |
| | Prostate-specific antigen (PSA) |
| Mutated | β-catenin |
| | BRCA1, BRCA2 |
| | Cyclin dependent kinase 4 (CDK4) |
| | Chronic Myelogenous Leukemia Tumor |
| | Antigen 66 (CML66) |
| | Fibronectin |
| | Melanoma antigen recognized by T-cells 2 |
| | (MART-2) |
| | p53 |
| | Ras |
| | TGF-β receptor type II (TGF-βRII) |
| Post-Translationally | Mucin 1, Cell Surface Associated (MUC1) |
| Altered | |
| Idiotypic | Immunoglobulin (Ig), T-cell Receptor (TCR) |

[0146] In some embodiments, the encoded payloads, such as the therapeutic proteins, are expressed under control of a eukaryotic promoter. In other embodiments, described herein, the encoded payloads, such as where the immunostimulatory bacterium is an RNA delivery vehicle, the payloads are expressed under control of a prokaryotic promoter recognized by the bacterium.

[0147] In all embodiments, the immunostimulatory bacteria can comprise genome modifications whereby the bacterium is flagellin⁻, asd⁻, msbB⁻, pagP⁻, and csgD⁻; or is ansB⁻, asd⁻, csgD⁻, purI⁻, msbB⁻, flagellin⁻, and pagP⁻; or is thyA⁻, asd⁻, csgD⁻, purI⁻, msbB⁻, flagellin⁻, and pagP⁻; or is thyA⁻, csgD⁻, purI⁻, msbB⁻, flagellin⁻, and pagP⁻; or other combinations of modifications as described herein.

[0148] The immunostimulatory bacteria provided herein can be an anti-cancer therapeutic. The immunostimulatory bacterium can be a vaccine for treating or preventing a cancer or infection from a pathogen. In such embodiments, the encoded payloads can be expressed under control of a prokaryotic promoter; and the nucleic acid encoding the payloads comprise translational regulatory signals that are recognized by eukaryotic ribosomes, and not by bacterial ribosomes. As a result the encoded products and constructs are transcribed by the bacteria but are not translated by the bacteria; they are translated when administered to a host and when in a host cell, such as a phagocytic cell. The immunostimulatory bacteria can encode an antigen or protein or epitope(s) thereof from a pathogen. Exemplary pathogens include, but are not limited to, pathogens that cause chronic viral infections, such as infections by hepatitis viruses, herpes viruses, varicella zoster virus (VZV), Epstein-Barr virus, human immunodeficiency virus (HIV), human T-cell leukemia virus (HTLV), Respiratory Syncytial Virus (RSV), and measles virus; or is a virus or other pathogen chronically infect subjects; and pathogens that cause acute infections, such as initial infections with chronic influenza and coronaviruses, such as Severe Acute Respiratory Syndrome coronavirus (SARS-CoV), Middle East Respiratory Syndrome coronavirus (MERS-CoV), and Severe Acute Respiratory Syndrome coronavirus 2 (SARS-CoV-2, which causes COVID-19).

[0149] In some embodiments, the plasmid encodes an antigen from a pathogen or an epitope or combination of epitopes thereof, such as an antigen from an essential viral protein, such as, for example, in the case of a coronavirus, an antigen from the Nucleocapsid, M and/or S proteins, which can result in neutralizing antibodies, and the enhancement of long-lived circulating and tissue-resident CD8+ T-cells. Provided are immunostimulatory bacteria where nucleic acid encoding the antigen, epitope, or antigenic protein is operatively linked to a prokaryotic promoter recognized by the bacterium; and the encoding sequence includes regulatory sequences for translation that are recognized by eukaryotic ribosomes, whereby the bacterium cannot translate the encoded RNA, or the encoding sequence does not include a Shine Dalgarno sequence that is recognized by the bacterial ribosomes so that the encoded mRNA is not translated; and the mRNA is delivered to the eukaryotic host cell into which the bacterium is delivered.

[0150] Any of the immunostimulatory bacteria provided herein can comprise a plasmid that encodes two or more therapeutic products under control of a single promoter, where expression of the nucleic acid encoding at least two or all of the products is under control of a single promoter, and the nucleic acid encoding each product is separated by nucleic acid resulting in separate translated products, such as nucleic acid encoding 2A polypeptides, whereby, upon translation, each product is separately expressed.

[0151] In all of the immunostimulatory bacteria provided herein, the nucleic acid encoding one or more of the therapeutic products is operatively linked to nucleic acid encoding a sequence that directs secretion of the expressed product(s). The therapeutic products include, co-stimulatory molecules, particularly one with a cytoplasmic domain deletion for expression on an antigen-presenting cell (APC), whereby the resulting truncated gene product is capable of constitutive immunostimulatory signaling to a T-cell through co-stimulatory receptor engagement, and is unable to counter-regulatory signal to the APC due to the cytoplasmic domain deletion. Exemplary of such co-stimulatory molecules is one or more of 4-1BBL, CD80, CD86, CD27L, B7RP1, CD24L, or OX40L, particularly with the cytoplasmic domain deletion.

[0152] The immunostimulatory bacteria can encode a plurality of products. In some embodiments, at least one product is selected from a) and at least one is selected from b), wherein: a) is IL-2, IL-7, IL-12p70 (IL-12p40+IL-12p35), IL-15, IL-23, IL-36 gamma, IL-2 that has attenuated binding to IL-2Ra, IL-15/IL-15R alpha chain complex (IL-15Rα-IL-15sc), IL-18, IL-2 that is modified so that it does not bind to IL-2Ra, CXCL9, CXCL10, CXCL11, interferon-α, interferon-β, CCL3, CCL4, CCL5, proteins that are involved in or that effect or potentiate recruitment and/or persistence of T cells, CD40, CD40 Ligand (CD40L), OX40, OX40 Ligand (OX40L), 4-1BB, 4-1BB Ligand (4-1BBL), members of the B7-CD28 family, TGF-beta polypeptide antagonists, or members of the tumor necrosis factor receptor (TNFR) superfamily; and b) is STING, RIG-I, MDA-5, IRF-3, IRF-5, IRF-7, IRF-8, TRIM56, RIP1, Sec5, TRAF3, TRAF2, TRAF6, STAT1, LGP2, DDX3, DHX9, DDX1, DDX9, DDX21, DHX15, DHX33, DHX36, DDX60, or SNRNP200.

[0153] Additional therapeutic products include, for example, one or more of a TGF-beta inhibitory antibody, a TGF-beta binding decoy receptor, an anti-IL-6 antibody, and an IL-6 binding decoy receptor. The immunostimulatory bacteria can encode one or more of the following combinations of therapeutic products:

[0154] IL-2 and IL-12p70;

[0155] IL-2 and IL-21;

[0156] IL-2, IL-12p70, and a STING GOF variant;

[0157] IL-2, IL-21, and a STING GOF variant;

[0158] IL-2, IL-12p70, a STING GOF variant, and 4-1BBL (including 4-1BBLΔcyt), where Δcyt is a deleted cytoplasmic domain;

[0159] IL-2, IL-21, a STING GOF variant, and 4-1BBL (including 4-1BBLΔcyt);

[0160] IL-15/IL-15Rα, and a STING GOF variant;

[0161] IL-15/IL-15Rα, a STING GOF variant, and 4-1BBL (including 4-1BBLΔcyt);

[0162] IL-15/IL-15Rα and IL-12p70;

[0163] IL-15/IL-15Rα and IL-21;

[0164] IL-15/IL-15Rα, IL-12p70, and a STING GOF variant;

[0165] IL-15/IL-15Rα, IL-21, and a STING GOF variant;

[0166] IL-15/IL-15Rα, IL-12p70, a STING GOF variant, and 4-1BBL (including 4-1BBLΔcyt);

[0167] IL-15/IL-15Rα, IL-21, a STING GOF variant, and 4-1BBL (including 4-1BBLΔcyt);

[0168] IL-12p70 and IL-21;

[0169] IL-12p70, IL-21, and a STING GOF variant;

[0170] IL-12p70, IL-21, a STING GOF variant, and 4-1BBL (including 4-1BBLΔcyt);

[0171] IL-12p70 and a STING GOF variant;

[0172] IL-12p70, a STING GOF variant, and 4-1BBL (including 4-1BBLΔcyt);

[0173] IL-12p70 and IL-18;

[0174] IL-12p70, IL-18, and a STING GOF variant;

[0175] IL-12p70, IL-18, a STING GOF variant, and 4-1BBL (including 4-1BBLΔcyt);

[0176] a TGF-β decoy receptor, IL-2, and IL-12p70;

[0177] a TGF-β decoy receptor, IL-2, and IL-21;

[0178] a TGF-β decoy receptor, IL-2, IL-12p70, and a STING GOF variant;

[0179] a TGF-β decoy receptor, IL-2, IL-21, and a STING GOF variant;

[0180] a TGF-β decoy receptor, IL-2, IL-12p70, a STING GOF variant, and 4-1BBL (including 4-1BBLΔcyt);

[0181] a TGF-β decoy receptor, IL-2, IL-21, a STING GOF variant, and 4-1BBL (including 4-1BBLΔcyt);

[0182] a TGF-β decoy receptor, IL-15/IL-15Rα, and a STING GOF variant;

[0183] a TGF-β decoy receptor, IL-15/IL-15Rα, a STING GOF variant, and 4-1BBL (including 4-1BBLΔcyt);

[0184] a TGF-β decoy receptor, IL-15/IL-15Rα, and IL-12p70;

[0185] a TGF-β decoy receptor, IL-15/IL-15Rα, and IL-21;

[0186] a TGF-β decoy receptor, IL-15/IL-15Rα, IL-12p70, and a STING GOF variant;

[0187] a TGF-β decoy receptor, IL-15/IL-15Rα, IL-21, and a STING GOF variant;

[0188] a TGF-β decoy receptor, IL-15/IL-15Rα, IL-12p70, a STING GOF variant, and 4-1BBL (including 4-1BBLΔcyt);

[0189] a TGF-β decoy receptor, IL-15/IL-15Rα, IL-21, a STING GOF variant, and 4-1BBL (including 4-1BBLΔcyt);

[0190] a TGF-β decoy receptor, IL-12p70, and IL-21;

[0191] a TGF-β decoy receptor, IL-12p70, IL-21, and a STING GOF variant;

[0192] a TGF-β decoy receptor, IL-12p70, IL-21, a STING GOF variant, and 4-1BBL (including 4-1BBLΔcyt);

[0193] a TGF-β decoy receptor and IL-12p70;

[0194] a TGF-β decoy receptor, IL-12p70, and a STING GOF variant;

[0195] a TGF-β decoy receptor, IL-12p70, a STING GOF variant, and 4-1BBL (including 4-1BBLΔcyt);

[0196] a TGF-β decoy receptor, IL-12p70, and IL-18;

[0197] a TGF-β decoy receptor, IL-12p70, IL-18, and a STING GOF variant;

[0198] a TGF-β decoy receptor, IL-12p70, IL-18, a STING GOF variant, and 4-1BBL (including 4-1BBLΔcyt);

[0199] a TGF-β decoy receptor and a STING GOF variant;

[0200] an anti-CTLA-4 antibody, IL-2, and IL-12p70;

[0201] an anti-CTLA-4 antibody, IL-2, and IL-21;

[0202] an anti-CTLA-4 antibody, IL-2, IL-12p70, and a STING GOF variant;

[0203] an anti-CTLA-4 antibody, IL-2, IL-21, and a STING GOF variant;

[0204] an anti-CTLA-4 antibody, IL-2, IL-12p70, a STING GOF variant, and 4-1BBL (including 4-1BBLΔcyt);

[0205] an anti-CTLA-4 antibody, IL-2, IL-21, a STING GOF variant, and 4-1BBL (including 4-1BBLΔcyt);

[0206] an anti-CTLA-4 antibody, IL-15/IL-15Rα, and a STING GOF variant;

[0207] an anti-CTLA-4 antibody, IL-15/IL-15Rα, a STING GOF variant, and 4-1BBL (including 4-1BBLΔcyt);

[0208] an anti-CTLA-4 antibody, IL-15/IL-15Rα, and IL-12p70;

[0209] an anti-CTLA-4 antibody, IL-15/IL-15Rα, and IL-21;

[0210] an anti-CTLA-4 antibody, IL-15/IL-15Rα, IL-12p70, and a STING GOF variant;

[0211] an anti-CTLA-4 antibody, IL-15/IL-15Rα, IL-21, and a STING GOF variant;

[0212] an anti-CTLA-4 antibody, IL-15/IL-15Rα, IL-12p70, a STING GOF variant, and 4-1BBL (including 4-1BBLΔcyt);

[0213] an anti-CTLA-4 antibody, IL-15/IL-15Rα, IL-21, a STING GOF variant, and 4-1BBL (including 4-1BBLΔcyt);

[0214] an anti-CTLA-4 antibody, IL-12p70, and IL-21;

[0215] an anti-CTLA-4 antibody, IL-12p70, IL-21, and a STING GOF variant;

[0216] an anti-CTLA-4 antibody, IL-12p70, IL-21, a STING GOF variant, and 4-1BBL (including 4-1BBLΔcyt);

[0217] an anti-CTLA-4 antibody and IL-12p70;

[0218] an anti-CTLA-4 antibody, IL-12p70, and a STING GOF variant;

[0219] an anti-CTLA-4 antibody, IL-12p70, a STING GOF variant, and 4-1BBL (including 4-1BBLΔcyt);

[0220] an anti-CTLA-4 antibody, IL-12p70, and IL-18;

[0221] an anti-CTLA-4 antibody, IL-12p70, IL-18, and a STING GOF variant;

[0222] an anti-CTLA-4 antibody, IL-12p70, IL-18, a STING GOF variant, and 4-1BBL (including 4-1BBLΔcyt);

[0223] an anti-CTLA-4 antibody and a STING GOF variant;

[0224] a CD40 agonist, IL-2, and IL-12p70;

[0225] a CD40 agonist, IL-2, and IL-21;

[0226] a CD40 agonist, IL-2, IL-12p70, and a STING GOF variant;

[0227] a CD40 agonist, IL-2, IL-21, and a STING GOF variant;

[0228] a CD40 agonist, IL-2, IL-12p70, a STING GOF variant, and 4-1BBL (including 4-1BBLΔcyt);

[0229] a CD40 agonist, IL-2, IL-21, a STING GOF variant, and 4-1BBL (including 4-1BBLΔcyt);

[0230] a CD40 agonist, IL-15/IL-15Rα, and a STING GOF variant;

[0231] a CD40 agonist, IL-15/IL-15Rα, a STING GOF variant, and 4-1BBL (including 4-1BBLΔcyt);

[0232] a CD40 agonist, IL-15/IL-15Rα, and IL-12p70;

[0233] a CD40 agonist, IL-15/IL-15Rα, and IL-21;

[0234] a CD40 agonist, IL-15/IL-15Rα, IL-12p70, and a STING GOF variant;

[0235] a CD40 agonist, IL-15/IL-15Rα, IL-21, and a STING GOF variant;

[0236] a CD40 agonist, IL-15/IL-15Rα, IL-12p70, a STING GOF variant, and 4-1BBL (including 4-1BBLΔcyt);

[0237] a CD40 agonist, IL-15/IL-15Rα, IL-21, a STING GOF variant, and 4-1BBL (including 4-1BBLΔcyt);

[0238] a CD40 agonist, IL-12p70, and IL-21;

[0239] a CD40 agonist, IL-12p70, IL-21, and a STING GOF variant;

[0240] a CD40 agonist, IL-12p70, IL-21, a STING GOF variant, and 4-1BBL (including 4-1BBLΔcyt);

[0241] a CD40 agonist and IL-12p70; a CD40 agonist, IL-12p70, and a STING GOF variant;

[0242] a CD40 agonist, IL-12p70, a STING GOF variant, and 4-1BBL (including 4-1BBLΔcyt);

[0243] a CD40 agonist, IL-12p70, and IL-18;

[0244] a CD40 agonist, IL-12p70, IL-18, and a STING GOF variant;

[0245] a CD40 agonist, IL-12p70, IL-18, a STING GOF variant, and 4-1BBL (including 4-1BBLΔcyt);

[0246] a tumor-associated antigen;

[0247] a CD40 agonist and a STING GOF variant. STING GOF variants include chimeric STING and non-human STING, including those described or exemplified herein, including those detailed above and below.

[0248] In all embodiments, the immunostimulatory bacterium can also encode a tumor-associated antigen. These bacteria are of interest for use as vaccines and as therapeutics. Other exemplary combinations of encoded products include:

[0249] IL-2 and IL-12p70;

[0250] IL-2 and IL-21;

[0251] IL-2, IL-12p70, and a STING GOF variant;

[0252] IL-2, IL-21, and a STING GOF variant;

[0253] IL-2, IL-12p70, a STING GOF variant, and 4-1BBL (including 4-1BBLΔcyt), where Δcyt is a deleted cytoplasmic domain;

[0254] IL-2, IL-21, a STING GOF variant, and 4-1BBL (including 4-1BBLΔcyt);

[0255] IL-15/IL-15Rα, and a STING GOF variant;

[0256] IL-15/IL-15Rα, a STING GOF variant, and 4-1BBL (including 4-1BBLΔcyt);

[0257] IL-15/IL-15Rα and IL-12p70;

[0258] IL-15/IL-15Rα and IL-21;

[0259] IL-15/IL-15Rα, IL-12p70, and a STING GOF variant;

[0260] IL-15/IL-15Rα, IL-21, and a STING GOF variant;

[0261] IL-15/IL-15Rα, IL-12p70, a STING GOF variant, and 4-1BBL (including 4-1BBLΔcyt);

[0262] IL-15/IL-15Rα, IL-21, a STING GOF variant, and 4-1BBL (including 4-1BBLΔcyt);

[0263] IL-12p70 and IL-21;

[0264] IL-12p70, IL-21, and a STING GOF variant;

[0265] IL-12p70, IL-21, a STING GOF variant, and 4-1BBL (including 4-1BBLΔcyt);

[0266] IL-12p70 and a STING GOF variant;

[0267] IL-12p70, a STING GOF variant, and 4-1BBL (including 4-1BBLΔcyt);

[0268] IL-12p70 and IL-18;

[0269] IL-12p70, IL-18, and a STING GOF variant;

[0270] IL-12p70, IL-18, a STING GOF variant, and 4-1BBL (including 4-1BBLΔcyt);

[0271] a TGF-β decoy receptor, IL-2, and IL-12p70;

[0272] a TGF-β decoy receptor, IL-2, and IL-21;

[0273] a TGF-β decoy receptor, IL-2, IL-12p70, and a STING GOF variant;

[0274] a TGF-β decoy receptor, IL-2, IL-21, and a STING GOF variant;

[0275] a TGF-β decoy receptor, IL-2, IL-12p70, a STING GOF variant, and 4-1BBL (including 4-1BBLΔcyt);

[0276] a TGF-β decoy receptor, IL-2, IL-21, a STING GOF variant, and 4-1BBL (including 4-1BBLΔcyt);

[0277] a TGF-β decoy receptor, IL-15/IL-15Rα, and a STING GOF variant;

[0278] a TGF-β decoy receptor, IL-15/IL-15Rα, a STING GOF variant, and 4-1BBL (including 4-1BBLΔcyt);

[0279] a TGF-β decoy receptor, IL-15/IL-15Rα, and IL-12p70;

[0280] a TGF-β decoy receptor, IL-15/IL-15Rα, and IL-21;

[0281] a TGF-β decoy receptor, IL-15/IL-15Rα, IL-12p70, and a STING GOF variant;

[0282] a TGF-β decoy receptor, IL-15/IL-15Rα, IL-21, and a STING GOF variant; a TGF-β decoy receptor, IL-15/IL-15Rα, IL-12p70, a STING GOF variant, and 4-1BBL (including 4-1BBLΔcyt);

[0283] a TGF-β decoy receptor, IL-15/IL-15Rα, IL-21, a STING GOF variant, and 4-1BBL (including 4-1BBLΔcyt);

[0284] a TGF-β decoy receptor, IL-12p70, and IL-21;

[0285] a TGF-β decoy receptor, IL-12p70, IL-21, and a STING GOF variant;

[0286] a TGF-β decoy receptor, IL-12p70, IL-21, a STING GOF variant, and 4-1BBL (including 4-1BBLΔcyt);

[0287] a TGF-β decoy receptor and IL-12p70;

[0288] a TGF-β decoy receptor, IL-12p70, and a STING GOF variant;

[0289] a TGF-β decoy receptor, IL-12p70, a STING GOF variant, and 4-1BBL (including 4-1BBLΔcyt);

[0290] a TGF-β decoy receptor, IL-12p70, and IL-18;

[0291] a TGF-β decoy receptor, IL-12p70, IL-18, and a STING GOF variant;

[0292] a TGF-β decoy receptor, IL-12p70, IL-18, a STING GOF variant, and 4-1BBL (including 4-1BBLΔcyt);

[0293] a TGF-β decoy receptor and a STING GOF variant;

[0294] an anti-CTLA-4 antibody, IL-2, and IL-12p70;

[0295] an anti-CTLA-4 antibody, IL-2, and IL-21;

[0296] an anti-CTLA-4 antibody, IL-2, IL-12p70, and a STING GOF variant;

[0297] an anti-CTLA-4 antibody, IL-2, IL-21, and a STING GOF variant;

[0298] an anti-CTLA-4 antibody, IL-2, IL-12p70, a STING GOF variant, and 4-1BBL (including 4-1BBLΔcyt);

[0299] an anti-CTLA-4 antibody, IL-2, IL-21, a STING GOF variant, and 4-1BBL (including 4-1BBLΔcyt);

[0300] an anti-CTLA-4 antibody, IL-15/IL-15Rα, and a STING GOF variant;

[0301] an anti-CTLA-4 antibody, IL-15/IL-15Rα, a STING GOF variant, and 4-1BBL (including 4-1BBLΔcyt);

[0302] an anti-CTLA-4 antibody, IL-15/IL-15Rα, and IL-12p70;

[0303] an anti-CTLA-4 antibody, IL-15/IL-15Rα, and IL-21;

[0304] an anti-CTLA-4 antibody, IL-15/IL-15Rα, IL-12p70, and a STING GOF variant;

[0305] an anti-CTLA-4 antibody, IL-15/IL-15Rα, IL-21, and a STING GOF variant; an anti-CTLA-4 antibody, IL-15/IL-15Rα, IL-12p70, a STING GOF variant, and 4-1BBL (including 4-1BBLΔcyt);

[0306] an anti-CTLA-4 antibody, IL-15/IL-15Rα, IL-21, a STING GOF variant, and 4-1BBL (including 4-1BBLΔcyt);

[0307] an anti-CTLA-4 antibody, IL-12p70, and IL-21;

[0308] an anti-CTLA-4 antibody, IL-12p70, IL-21, and a STING GOF variant;

[0309] an anti-CTLA-4 antibody, IL-12p70, IL-21, a STING GOF variant, and 4-1BBL (including 4-1BBLΔcyt);

[0310] an anti-CTLA-4 antibody and IL-12p70;

[0311] an anti-CTLA-4 antibody, IL-12p70, and a STING GOF variant;

[0312] an anti-CTLA-4 antibody, IL-12p70, a STING GOF variant, and 4-1BBL (including 4-1BBLΔcyt);

[0313] an anti-CTLA-4 antibody, IL-12p70, and IL-18;

[0314] an anti-CTLA-4 antibody, IL-12p70, IL-18, and a STING GOF variant;

[0315] an anti-CTLA-4 antibody, IL-12p70, IL-18, a STING GOF variant, and 4-1BBL (including 4-1BBLΔcyt);

[0316] an anti-CTLA-4 antibody and a STING GOF variant;

[0317] a CD40 agonist, IL-2, and IL-12p70;

[0318] a CD40 agonist, IL-2, and IL-21;

[0319] a CD40 agonist, IL-2, IL-12p70, and a STING GOF variant;

[0320] a CD40 agonist, IL-2, IL-21, and a STING GOF variant;

[0321] a CD40 agonist, IL-2, IL-12p70, a STING GOF variant, and 4-1BBL (including 4-1BBLΔcyt);

[0322] a CD40 agonist, IL-2, IL-21, a STING GOF variant, and 4-1BBL (including 4-1BBLΔcyt);

[0323] a CD40 agonist, IL-15/IL-15Rα, and a STING GOF variant;

[0324] a CD40 agonist, IL-15/IL-15Rα, a STING GOF variant, and 4-1BBL (including 4-1BBLΔcyt);

[0325] a CD40 agonist, IL-15/IL-15Rα, and IL-12p70;

[0326] a CD40 agonist, IL-15/IL-15Rα, and IL-21;

[0327] a CD40 agonist, IL-15/IL-15Rα, IL-12p70, and a STING GOF variant;

[0328] a CD40 agonist, IL-15/IL-15Rα, IL-21, and a STING GOF variant;

[0329] a CD40 agonist, IL-15/IL-15Rα, IL-12p70, a STING GOF variant, and 4-1BBL (including 4-1BBLΔcyt);

[0330] a CD40 agonist, IL-15/IL-15Rα, IL-21, a STING GOF variant, and 4-1BBL (including 4-1BBLΔcyt);

[0331] a CD40 agonist, IL-12p70, and IL-21;

[0332] a CD40 agonist, IL-12p70, IL-21, and a STING GOF variant;

[0333] a CD40 agonist, IL-12p70, IL-21, a STING GOF variant, and 4-1BBL (including 4-1BBLΔcyt);

[0334] a CD40 agonist and IL-12p70;

[0335] a CD40 agonist, IL-12p70, and a STING GOF variant;

[0336] a CD40 agonist, IL-12p70, a STING GOF variant, and 4-1BBL (including 4-1BBLΔcyt);

[0337] a CD40 agonist, IL-12p70, and IL-18;

[0338] a CD40 agonist, IL-12p70, IL-18, and a STING GOF variant;

[0339] a CD40 agonist, IL-12p70, IL-18, a STING GOF variant, and 4-1BBL (including 4-1BBLΔcyt);

[0340] a CD40 agonist and a STING GOF variant;

[0341] a bi-specific T-cell engager (BiTe)+a STING protein, a BiTe+IL-15, a BiTe+IL-15+a STING protein, where the BiTe targets DLL3, EGFR, Her2, CEA, Mesothelin, PSMA, EpCAM, CD74, Folate Receptor, Nectin4, EphA2, CA-IX, B7H3, Siglec-15, Muc1, or Lewis Y antigen;

[0342] a tumor antigen(s)+STING gain-of-function variant;

[0343] a therapeutic composition of a tumor antigen(s) and IL-15;

[0344] a therapeutic composition of a tumor antigen(s)+IL-15+a STING gain-of-function variant;

[0345] one or more antigens and an IFN;

[0346] one or more antigens and an IFNα;

[0347] one or more antigens, and IFNα2 or an IFNα1-16;

[0348] one or more antigens and any of IFNα1-16;

[0349] one or more antigens and IFN-β;

[0350] one or more antigens, IFNα2, and IFN-β;

[0351] one or more antigens and an IRF3 GOF variant with the mutation S396D;

[0352] one or more antigens, IFNα2 or an IFNα1-16, and an IRF3 GOF variant with the mutation S396D;

[0353] IFNalpha2+IRF3-S396D;

[0354] IFNα1-16+IRF3-S396D;

[0355] IFNalpha2+IFN-beta;

[0356] IFNα1-16+IFN-beta;

[0357] FLT-3L, or sialidase, or IL-12p35, or Azurin, or a membrane anchored IL-2, IL-12, IL-12p35, IL-21, IL-15, FLT-3L, alone or in combination with other immunostimulatory proteins; and

[0358] a TLR8 agonist, where the agonist is polyU or polyU/G, a microRNA, or miR-21, alone or in combination with any of the immunostimulatory proteins. In all embodiments, the immunostimulatory bacteria can encode a tumor-associated antigen, such as, for example, any listed in the table above, and described herein.

[0359] Other encoded therapeutic products include, for example, a bi-specific T-cell engager, such as, for example, one that binds Delta-like ligand 3 (DLL3) and CD3. In all embodiments, the immunostimulatory bacteria can encode a cytokine, such as a cytokine, and a modified or variant STING protein. The immunostimulatory bacteria a encode immunostimulatory protein(s) that confers or contributes to anti-tumor immunity in the tumor microenvironment, such as a cytokine or a chemokine that confers or contributes to anti-tumor immunity in the tumor microenvironment. Exemplary of cytokines are IL-15, IL-2, and IL-12, such as IL-15/IL-15R alpha chain complex. Exemplary of STING proteins are any described herein, particularly those that include gain-of-function mutations so that the STING protein constitutively induces type I IFN. The STING protein also can be modified or be selected so that it has lower NF-κB signaling activity than human STING, so that NF-κB signaling is low, and type I IFN induction is constitutive.

[0360] Exemplary of STING proteins is a chimeric STING protein that comprises a human STING protein with the CTT from Tasmanian devil, or is chimeric STING that comprises a human STING protein with the CTT from Tasmanian devil and having one or more gain-of-function mutations, such as one or both of N154S and R284G or any of the mutations described herein or known in the art to effect constitutive activity. Exemplary modified STING gain-of-function variant are any described herein.

[0361] The encoded therapeutic products, can comprise a multimerization domain, such as an Fc domain. Other encoded therapeutic products include any described herein, such as a product that a B7 protein transmembrane domain, and/or a bi-specific T-cell engager antibody. The encoded therapeutic products can be GPI-anchored, or include moieties, such as polypeptides, such as human serum albumin or a portion thereof, that increase serum half-life of the encoded product. The therapeutic products can be other fusion proteins, such as a fusion to collagen.

[0362] The immunostimulatory bacterium can be derived from any suitable bacterial species, including, but are not limited to, species such as Salmonella, Listeria, and E. coli, and any listed or described herein. The immunostimulatory bacterium contain genome modifications, whereby the bacteria do not infect or have reduced infectivity of epithelial cells, and modified LPS to attenuate the bacteria and/or to increase uptake or infection of phagocytic cells, such as tumor-resident macrophage, and to increase tumor colonization. Various genome modifications are described herein that effect such properties. Strains include those that lack flagella and have penta-acylated LPS. Exemplary strains, include those designated YS1646Δasd/ΔFLG/ΔpagP/ΔansB/ΔcsgD/F-ΔpurI, or YS1646Δasd/ΔFLG/ΔpagP/ΔansB/ΔcsgD/F-ΔpurI/ΔthyA.

[0363] The bacteria provided herein are useful as therapeutics for diseases, disorders, and conditions, such as cancers. They also are useful as vaccines to prevent (reduce the risk of the diseases, disorders, and conditions, or the severity thereof) or treat diseases, disorders, and conditions, such as one caused by a pathogen or cancers. Provided are genome modified bacteria that comprise genome modifications, whereby the response by toll-like receptors (TLRs) 2, 4, and 5 is reduced compared to the bacterium without the genome modifications, wherein:

[0364] the bacterium comprises further genomic modifications whereby it is auxotrophic for a required nutrient or factor so that it is unable to replicate in a eukaryotic host, but can replicate in vitro when supplied with the nutrient or factor;

[0365] the bacterium comprises a plasmid containing nucleic acid encoding a product, or comprises RNA encoding the product;

[0366] the product encoded by the nucleic acid or RNA is an antigenic sequence or sequences from a pathogen that is a pathogenic virus, bacterium, or parasite, or is a tumor antigen, whereby, upon expression of the encoded antigen in the host, the host develops an immune-protective response or immunizing response against the pathogenic virus, bacterium, parasite, or tumor antigen, or the product is a therapeutic product;

[0367] expression of the antigenic sequence(s) is/are under control of a prokaryotic promoter so that RNA encoding the antigen(s) is produced in the bacterium; nucleic acid encoding the antigen comprises regulatory sequences that inhibit or prevent translation of encoded RNA by bacterial ribosomes, but that does not inhibit or prevent translation of the encoded RNA by eukaryotic host ribosomes, whereby translation is de-coupled from transcription in the bacterium;

[0368] the resulting bacterium is selective for infecting phagocytic cells when administered to a eukaryotic subject, and delivers the nucleic acid into the phagocytic cells, wherein the RNA is translated.

[0369] These immunostimulatory bacterium can encode a plurality of products, which can be encoded as polycistronic message or under control of separate promoters, or in any suitable configuration. The nucleic acid encoding the products or at least the antigenic sequence(s) can comprise sequences that prevent or inhibit translation by a prokaryotic host, such as the bacterium, and/or include sequences that facilitate translation in a eukaryotic host, while inhibiting or preventing translation in the bacterium. Exemplary of such sequences is an internal ribosomal entry site (IRES) sequence, whereby host cell translation is facilitated or enhanced, and bacterial translation is inhibited or prevented. As a result the products encoded in the bacterium are transcribed into RNA, but not translated until they are in a eukaryotic host. The bacteria thereby serve as RNA delivery vehicles. Exemplary of an IRES is where the IRES is a Vascular Endothelial Growth Factor and Type 1 Collagen Inducible Protein (VCIP) IRES. Exemplary bacteria are provided, where the nucleic acid encoding the antigen(s) comprises a VCIP or other IRES that inhibits or reduces translation in the bacterium, and permits and optionally promotes or enhances translation in a eukaryotic host. The translational regulatory sequence, such as the IRES or the VCIP IRES, can be included in the plasmid, at a position that is 3′ of the promoter and 5′ of the antigen(s) coding sequence. An exemplary of a VCIP IRES is set forth in SEQ ID NO:434 or is a sequence that has at least 98% sequence identity therewith and has activity as an IRES.

[0370] Pathogens from which or against which the encoded antigens are derived include any pathogen, such as a bacterium or a virus. The encoded antigens also include tumor antigens. The resulting bacterium can be a vaccine to prevent or treat a viral infection or a bacterial infection or to prevent or treat a cancer. The pathogen can be selected from among viruses that causes chronic viral infections. Exemplary of infections are infections caused by hepatitis viruses, herpes viruses, varicella zoster virus (VZV), Epstein-Barr virus, human immunodeficiency virus (HIV), human T-cell leukemia virus (HTLV), Respiratory Syncytial Virus (RSV), measles virus, and other viruses that chronically infect subjects. The infection can be an acute infection, such as an infection caused by Severe Acute Respiratory Syndrome coronavirus (SARS-CoV), Middle East Respiratory Syndrome coronavirus (MERS-CoV), or Severe Acute Respiratory Syndrome species of Escherichia, Staphylococcus, Pseudomonas, Actinobacteria, Archaeobacteria, Mycobacteria or Porphyromonas. Other pathogens include P. gingivalis, SARS-CoV2, or E. coli, or Haemophilus influenza.

[0371] The plasmid in the bacterium can encode an antigen, and also can further encode an immunostimulatory protein or other adjuvant, as well as a combination of immunostimulatory proteins or other therapeutic proteins, such as a STING protein particularly a modified STING that comprises gain-of-function mutation and/or a chimeric STING protein, such as any described herein. Hence any of the bacterium described herein can be provided so that they deliver mRNA encoding any of the products and combinations described herein. The products can be encoded in the plasmid as part of a polycistronic sequence with expression of the antigen under control of a prokaryotic promoter recognized by the bacterium; or the immunostimulatory protein(s) and/or other therapeutic proteins are encoded on the plasmid under control of a eukaryotic promoter recognized by the eukaryotic host. The resulting bacterium can comprises mRNA encoding the antigen(s) and any other proteins expressed under control of a prokaryotic promoter, where the mRNA is produced by culturing the bacterium in vitro. The bacteria include those that comprises genome modifications whereby the bacterium lacks flagella and produces LPS with penta-acylated lipid A. The bacteria can optionally be asd⁻ or thyA⁻ or both, and/or one or both of an adenosine auxotroph, and csgD⁻, and is optionally ansB⁻. The bacterium can comprise or further comprise nucleic acid encoding a TLR8 agonist, such as, for example, polyU, polyU/G, a microRNA, or miR-21. Exemplary of the bacteria is one that is msbB⁻/pagP⁻, lacks flagella, and is asd⁻ or thyA⁻ or both asd⁻ and thyA⁻. Exemplary bacterial species include, but are not limited to, a species or strain of Escherichia, Listeria, Mycobacteria, or Salmonella. The bacterium can be a strain of Salmonella, such as a Salmonella typhimurium. The unmodified Salmonella can be a wild-type strain, or the unmodified Salmonella strain can be an attenuated strain. Exemplary of the starting bacteria are those derived from strain VNP20009 or YS1646, or from strain ATCC 14028, or from a strain having all of the identifying characteristics of strain ATCC 14028.

[0372] Genome modifications include any modification that results in a change the nucleic acid sequence, and generally a phenotype. Genome modifications include one or more of a deletion, insertion, disruption, transposition, and other modification in a gene, whereby the product encoded by the gene is not produced or, as produced, is inactive.

[0373] Promoters that control expression of the encoded products in the plasmid can be prokaryotic promoters, particularly in embodiments in which the bacterium is provided as a vaccine and/or as an RNA delivery vehicle. These include embodiments in which the product is expressed in vitro in the bacterium prior to administration to a subject, such as a human or animal. Prokaryotic promoters include bacterial promoters and bacterial phage promoters. Any promoter recognized by the bacterial RNA polymerase or by an encoded phage polymerase.

[0374] Provided are vaccines, comprising ay of the bacteria provided herein, particularly those that encode antigens for immunization for treatment or prevention, in an amount and in a vehicle for administration into a subject to elicit an adaptive immune response in a subject. The vaccine and other compositions containing the bacteria provided herein can be formulated for any route of administration, such as formulated as an aerosol, or as a powder, or as a tablet, or a suppository. They can be formulated for oral administration, nasal administration, inhalation administration, rectal administration, vaginal administration, intraocular administration, intracranial administration, intradermal administration, or intramuscular administration.

[0375] Provided are vaccines that comprise nucleic acid encoding an antigen from a protein from a viral pathogen, such as a respiratory virus, such as a corona virus, such as SARS-CoV-2, formulated for nasal or pulmonary inhalation. The vaccine is formed and formulated such that it does not sufficiently activate TLR2, whereby the vaccine induces type I IFN. Activation of TLR2 inhibits or reduces activation of type I IFN; thus, a vaccine that does not activate TLR2 or does so at a low enough level so that type I IFN is activated, such as by the immunostimulatory bacteria and vaccines provided herein.

[0376] The vaccines, also are formed/formulated so that they do not activate or have low enough activation of a TLR4 and/or TRL5 response sufficient to decease or inhibit type I IFN, so that type I IFN is expressed. As described herein, many vaccines and delivery vectors designed to stimulate type I IFN expression, also have properties that activate TLR2, 4 and/or 5, which activation is at level sufficient to inhibit or reduce type I IFN expression. The immunostimulatory bacterium and vaccines provided herein are designed so that they do not sufficiently activate particularly TLR2, and also TLR4 and/or TLR5, so that expression of type I IFN is not reduced or inhibited by the bacterium or vaccine.

[0377] Provided are vaccines that comprise nucleic acid that encodes an antigen or protein or epitope from a pathogen or tumor, where the vaccine elicits an immune response against the pathogen or tumor; the pathogen is a respiratory pathogen that infects the respiratory system including the lungs and/or naso-pharynx; the tumor is a lung or respiratory tract tumor; the vaccine is formulated for inhalation through the nose or lungs; the vaccine delivers the nucleic acid to phagocytic macrophages to convert the immunosuppressive phagocytic macrophages to immunostimulatory, phagocytic macrophages that are capable of in situ antigen cross-presentation to CD8+ T-cells, and of migration to lymph nodes to prime CD4+ and CD8+ T-cells. The vaccine is designed, formed, and/or formulated so that it does not activate a TLR4 and/or TRL5 response sufficient to decease or inhibit type I IFN. Vaccines that do not activate TLR2/4/5 sufficiently to decrease or inhibit type IF are provided. The vaccines can encode product so that the vaccine elicits an immune response against a pathogen, such as a virus. Virus pathogens include mRNA viruses, such as a corona virus or influenza virus. Corona viruses include, SARS virus, such as a SARS-COV2 virus. The vaccines encode an antigen, protein, or epitope of from a pathogen, such as a viral antigen, protein, or epitope. Exemplary of proteins is a capsid or nucleoprotein. For example, where the virus is SARS-COV2, the protein or epitope is or is from a protein designated or encoded by S1, S2, Envelope (E), Membrane (M), Nucleocapsid (N), ORF3a, ORF6, ORF7a, ORF7b, and ORF8, such as a protein or epitope that is or is from or is a spike protein. The vaccines include the bacteria provided herein that deliver mRNA, such as mRNA encoding the protein or antigen. The mRNA include mRNA that is modified to increase stability of the mRNA and/or the stability of the encoded protein or antigen or epitope. The encoded proteins can be modified, such as modification that alter the structure of the protein to alter interaction with host cell proteins. For example, mRNA and proteins have been designed that improve or increase or stabilize the interaction of the encoded protein or epitope with a cell surface receptor. Modified mRNA encoding the spike protein from a SARS-COV2 virus has been designed; the skilled person similarly can design other modified proteins/mRNA from other viruses to enhance or improve the efficacy in preventing or reducing or ameliorating the disease caused by the virus. The vaccines can be delivery vehicles, such as oncolytic viruses and immunostimulatory bacteria, that comprise nucleic acid that encodes an antigen or protein from a pathogen, or encodes a tumor antigen.

[0378] The vaccine provided herein can comprise an immunostimulatory bacterium, where the bacterium comprises genome modifications, whereby it has penta-acylated lipopolysaccharides (LPS), and lacks flagella, wherein wild-type bacterium has flagella. The immunostimulatory bacteria can further include a genome modification or modifications, whereby it does not produce curli fimbriae, such as by modifications the render the bacterium csgD⁻. The immunostimulatory bacteria in these vaccines can comprise a plasmid that encodes an antigen against a pathogen or a tumor antigen. The plasmid can encode a plurality of products, such as a therapeutic product that is part of a cytosolic DNA/RNA sensor pathway that leads to expression of type I interferon (IFN), such as any known to those of skill in the art and any described herein.

[0379] The immunostimulatory bacteria include attenuated and wild-type bacteria, and include Gram-negative and gram-positive bacteria, such as, but not limited to, a strain of Salmonella, Shigella, E. coli, Bifidobacteriae, Rickettsia, Vibrio, Listeria, Klebsiella, Bordetella, Neisseria, Aeromonas, Francisella, Cholera, Corynebacterium, Citrobacter, Chlamydia, Haemophilus, Brucella, Mycobacterium, Mycoplasma, Legionella, Rhodococcus, Pseudomonas, Helicobacter, Bacillus, or Erysipelothrix, or Archaeobacteria, an attenuated strain thereof or a modified strain thereof of any of the preceding list of bacterial strains. Exemplary bacteria, include, for example, Rickettsia rickettsii, Rickettsia prowazekii, Rickettsia tsutsugamushi, Rickettsia mooseri, Rickettsia sibirica, Bordetella bronchiseptica, Neisseria meningitidis, Neisseria gonorrhoeae, Aeromonas eucrenophila, Aeromonas salmonicida, Francisella tularensis, Corynebacterium pseudotuberculosis, Citrobacter freundii, Chlamydia pneumoniae, Haemophilus somnus, Brucella abortus, Mycobacterium intracellulare, Mycobacterium tuberculosis, Staphylococcus aureus, Legionella pneumophila, Rhodococcus equi, Pseudomonas aeruginosa, Helicobacter mustelae, Vibrio cholerae, Bacillus subtilis, Erysipelothrix rhusiopathiae, Yersinia enterocolitica, Rochalimaea quintana, or Agrobacterium tumefaciens. Exemplary of the bacteria are strains of Salmonella, such as a Salmonella typhimurium strain or a wild-type strain, or an attenuated strain. Exemplary of Salmonella strains are those derived from strain VNP20009 or YS1646, or strain ATCC 14028, or a strain having all of the identifying characteristics of strain ATCC 14028.

[0380] The immunostimulatory bacteria and vaccine strains can comprise genomic modifications, as described, such as those that are ansB⁻, asd⁻, csgD⁻, purI⁻, msbB⁻, flagellin, and pagP⁻ or that are ansB⁻, thyA⁻, csgD⁻, purI⁻, msbB⁻, flagellin⁻, and pagP⁻. The bacteria can be a strain that encodes and expresses, or that is modified to encode and express the gene resistance to complement killing (rck). Exemplary of rck genes is a Salmonella rck gene. For example E. coli does not encode a rck gene, but can be modified to do so by introducing the Salmonella rck gene, such as on a plasmid.

[0381] Pharmaceutical Compositions

[0382] Provided are pharmaceutical composition, comprising any of the bacteria and/or vaccines provided herein. The bacterium or other delivery vehicle is formulated in in a pharmaceutically acceptable vehicle. The formulation can be a liquid, powder, such as a lyophilized powder, or tablet, or other suitable formulation. The vaccines, in particular, can be locally administered, such as, but not limited to, by inhalation, intramuscular, and transdermal administration, so that a local immune response can result to prevent or reduce the likelihood of or severity of an infection. For treating tumors, the bacteria and vaccines can be administered systemically, such as by intravenous administration, or can be ad mistered by intratumoral, or other route, such as intrahepatic, peritoneal, and other modes. The immunostimulatory bacteria accumulate and colonize phagocytic cells, particularly those at the locus of administration, and/or in phagocytic cells in the tumor microenvironment and in tumors.

[0383] Provided are the pharmaceutical compositions that comprise the immunostimulatory bacteria, or the vaccines or RNA delivery systems provided herein, in a pharmaceutically acceptable vehicle. They can be formulated for any suitable route of administration, dependent upon their intended use or purpose. For treating cancer, for example, the immunostimulatory bacteria and vaccines can be formulated for systemic administration. They can be formulated for parenteral administration, or intravenous administration, or intramuscular administration, or intratumoral administration, or intraperitoneal administration, or oral administration, or rectal administration, or vaginal administration, or intraocular administration, or intradermal administration, or intracranial administration, or mucosal administration, or administration by inhalation into the mouth or nose. The vaccines include formulations for local, or intramuscular, or oral or nasal inhalation, for example.

[0384] Methods and Uses

[0385] The vaccines and bacteria and pharmaceutical compositions provided herein are for use for treatment of diseases, disorders, and conditions, including cancer and infections, and for prevention or treatment or reduction in symptoms thereof. Provided are bacteria, referred to herein as immunostimulatory bacteria by virtue of their ability to accumulate in and phagocytic cells, including tumor-resident macrophage, and to, stimulate an immune response by virtue of their properties and composition, additionally by virtue of the encoded payloads, and the combination of the properties and structure of the bacteria and the payloads. The bacteria can be used as therapeutics for treatment of diseases, disorders, and conditions, and by virtue of the components of the nucleic acid constructs in the plasmids in the bacteria can produce encoded proteins, and also can be used to deliver mRNA.

[0386] Methods of treatment of cancer and/or viral other pathogen infections, are provided. The uses and methods include administering or using the RNA delivery systems and vaccines and immunostimulatory bacteria provided herein for treating or preventing (reducing the risk of or severity of the diseases, disorders, and condition) cancer and/or a viral infection. The immunostimulatory bacteria and vaccines are those that encode encodes a tumor-associated antigen or viral or other pathogen antigen, protein or epitope.

[0387] Hence provided are uses and methods of treatment using the immunostimulatory bacteria, vaccines, delivery vehicles and composition provided herein for use for treating or preventing (reducing the risk of developing) a disease or condition or infection or cancer.

[0388] Also provided are methods of converting an M2 macrophage to an M1 or M1-like phenotype, by administering the immunostimulatory bacterium that is modified as described herein, and that encodes an immunostimulatory protein, such STING, particularly a modified STING, and combinations of the modified STING with a cytokine, such as an IL-15, such as IL-15/IL-15R alpha chain complex. These immunostimulatory bacteria are used for treating or administered to a subject with a condition, disease, or disorder treated by enhancing an anti-viral or anti-tumor immune response. Provided are uses of the immunostimulatory bacteria to convert an M2 macrophage to an M1 or M1-like phenotype macrophage in a subject with a condition, disease, or disorder treated by enhancing an anti-viral or anti-tumor immune response. The subject can have a disease, disorder, or condition that is a cancer and/or a viral or other pathogen infection.

[0389] Provided are methods of delivering RNA encoding a therapeutic product, comprising administering an immunostimulatory bacterium, designed as described above, and below, to deliver RNA, for treatment of a disease, condition, or disorder. Uses of such bacteria for treatment also are provided. Diseases, disorders, and conditions, include cancers and/or a viral or other pathogen infections. As described herein, the immunostimulatory bacteria are used to transcribe the encoded products in vitro, but not translate them, so that they deliver RNA, such as mRNA, when administered to a subject. Provided are bacteria for use for delivering RNA to a subject, comprising a plasmid encoding a heterologous product, where: the nucleic acid encoding the heterologous product is linked to a promoter recognized by the bacterium; and the nucleic acid encoding the product comprises eukaryotic sequences for translation that are not recognized by the bacterium, whereby the bacterium produces RNA, but does not translate the RNA. The bacteria deliver RNA encoding a therapeutic product and/or an antigen or protein from a pathogen or tumor for eliciting an immune response against the antigen or protein.

[0390] Provided are methods of treating cancers, including metastatic cancers, such as those that comprise a solid tumor, hematological malignancy, and metastases, by administering the immunostimulatory bacterium, bacterium or vaccine or pharmaceutical compositions comprising the bacteria, such as those that encode tumor-associated antigens, and/or combinations of payloads of immunostimulatory proteins, as described above and below.

[0391] Methods of immunization against pathogens and cancers are provided by administering the vaccines provided herein. Provided are uses of the immunostimulatory bacterium, bacterium, virus, or vaccine, or the pharmaceutical compositions, for treatment of a cancer that comprises a solid tumor or a hematological malignancy in a subject or for immunizing against a cancer or immunizing against a pathogen, to thereby prevent or reduce the risk of getting or reduce symptoms and consequences thereof. The immunostimulatory bacteria are for treating mammalian subjects, including cats, dogs and other pets, and farm and zoo animals, and humans.

[0392] Also provided are combination of the methods, uses, immunostimulatory bacteria, pharmaceutical compositions, and vaccines provided herein with a second anti-cancer agent or treatment, such as, but are not limited to, chemotherapy, immunotherapy, radiation, and surgery. The second anti-cancer agent or treatment can be administered before, concomitantly with, after, or intermittently with, the immunostimulatory bacterium, vaccine, or pharmaceutical composition. Exemplary of immunotherapy agents are checkpoint inhibitors, such as anti-checkpoint antibodies, such as, for example, an anti-PD-1, or anti-PD-L1, or anti-CTLA-4 antibody, and CAR-T therapy. Agents include antibodies, such as, for example, anti-PD-1, anti-CTLA-4, anti-PD-L1, anti-TL-6, anti-Siglec-15, anti-VEGF, anti-CD73, and anti-CD38 antibodies. Other second agents and treatments for combination therapies include, but are not limited to, a poly (ADP-ribose) polymerase (PARP) inhibitor, a histone deacetylase (HDAC) inhibitor, a chemotherapy agent, an anti-EGFR antibody, a CAR-T cell, an anti-Her2 antibody, an anti-mesothelin antibody, and an anti-B-cell maturation antigen (BCMA) antibody.

[0393] Routes of administration include any suitable route, including, but not limited to, parenteral, enteral, systemic, local, or topical, such as, but not limited to, oral, or rectal, or by aerosol into the lung and/or nose, or mucosal, or intracranial, or intradermal, or intratumoral, intravenously, intramuscularly, intranasally, by inhalation, or subcutaneously. For example, the vaccines can be administered to the sites of infection, such as by inhalation for a respiratory virus.

[0394] Cancers that are treated include, but are not limited to, cancers selected from among leukemia; lymphoma; gastric cancer; and cancer of the breast, heart, lung, small intestine, colon, spleen, kidney, bladder, head and neck, colorectum, ovary, prostate, brain, pancreas, skin, bone, bone marrow, blood, thymus, uterus, testicles, cervix, and liver. The immunostimulatory bacteria include, for example, species of Salmonella, Shigella, Listeria, and E. coli species, such as, for example, a Salmonella typhimurium strain.

[0395] Methods of treatment of viral infections and other pathogen infections are provided, where the immunostimulatory bacterium or vaccine comprises or encodes an antigen, protein, or epitope thereof from the virus or pathogen. As described the immunostimulatory bacteria include genome modifications, such as modifications to reduce or eliminate or attenuate TRL2, and TRL4, and/or TLR5, or TLR2 response/activity, whereby type I IFN expression is not inhibited. For the vaccines, the immunostimulatory bacteria can encode an antigen, protein and/or epitope thereof under control of a promoter recognized by the bacterium; and the immunostimulatory bacterium can comprise a genome modification(s), whereby it does not replicate in vivo. As described the encoding nucleic acid can include sequences or lack sequence, whereby the RNA is expressed in the bacterium, but is not translated. The RNA can be translated by a eukaryotic host.

[0396] For example, the bacterium comprises a plasmid that encodes RNA operably linked to a promoter recognized by a polymerase present in the bacterium, wherein, upon infection of a eukaryotic host cell, the RNA is released into the cytoplasm of the eukaryotic host. The RNA includes mRNA that can be translated by the eukaryotic host cell when the bacterium is administered to a eukaryotic subject, such as a human. The nucleic acid in the plasmid encoding the RNA is operatively linked to a eukaryotic promoter, such as an inducible or constitutive promoter, such as a strong promoter such as a late promoter from a eukaryotic virus. Prokaryotic promoters include those recognized by non-bacterial prokaryotic RNA polymerases, such as bacteriophage RNA polymerase that is encoded by the bacteria, such as on the plasmid. Encoded bacteriophage RNA polymerases that recognize bacterial promoters is a T7 RNA polymerase. For use as vaccines, and other uses, the immunostimulatory bacteria can be asd⁻ or is thyA⁻ or both, whereby they do not replicate in the absence of the required nutrient. The asd can be complemented by encoding it on the plasmid under control of a eukaryotic polymerase so that the bacteria can replicate in vivo when in a host cell. The particular deficiencies and manner in which they are implemented depends upon intended uses, as described herein, and is well within the level of skill in the art in view of the description herein.

[0397] Immunostimulatory bacteria and vaccines provided herein can be used for treating a tumor or a viral infection, wherein the bacterium encodes an anti-cancer or anti-viral therapeutic product or antigen, protein, or epitope or combinations thereof from the virus or tumor. Provided are methods of immunizing to prevent (reduce the risk of) infection by a virus or other infectious agent, comprising administering an immunizing dose of the immunostimulatory bacterium or vaccine provided herein, where a product encoded by the immunostimulatory bacterium is an anti-viral or anti-pathogen therapeutic or antigen, epitope, or protein. The immunostimulatory bacteria and vaccines can be used for immunizing against, to protect against, or to reduce the severity of or reduce the risk of infection by a virus or another infectious agent, wherein a produced encoded by the immunostimulatory bacterium is an anti-viral or anti-pathogen therapeutic or antigen, epitope, or protein. Exemplary pathogens include viruses.

[0398] Modified STING Proteins and Encoding Nucleic Acids

[0399] Provided are modified STING proteins that have increased or constitutive activity whereby type I IFN expression is increased or constitutive. In general, the STING proteins comprise mutations whereby, when introduced into a eukaryotic cell, such as a human, type I IFN expression is constitutive. The STING proteins also can have lower NF-κB signaling activity than human STING. The STING proteins are provided in delivery vehicles, such as the bacteria provided herein, and other delivery vehicles, such as oncolytic vectors and nanoparticles, that encode the modified STING proteins for expression in subject to whom the delivery vehicle is administered.

[0400] Provided are the modified STING proteins and encoding nucleic acids, including plasmids and constructs, for expression thereof. Reference to the modified STING proteins includes reference to the encoding nucleic acids, plasmids, and constructs. Provided are modified Stimulator of Interferon Genes (STING) proteins from a non-human species, where the non-human STING is one that has lower NF-κB signaling activity compared to human STING, and, optionally, higher type I interferon (IFN) pathway signaling activity compared to human STING, where: the non-human STING protein is modified to include a mutation or mutations so that it has increased activity or acts constitutively in the absence of cytosolic nucleic acids; the mutations are insertions, deletions, and/or replacements of amino acids; and the STING protein optionally has a deletion or disruption of the TRAF6 binding site.

[0401] Also provided are modified Stimulator of Interferon Genes (STING) proteins from a non-human species, or chimeric human STING proteins and modified forms thereof, comprising one or more mutation(s) associated with gain-of-function (GOF) that result in the constitutive activation of the encoded STING protein and/or enhanced sensitivity, or increased affinity or binding to endogenous ligands, whereby the STING protein is modified by one or more of an insertion, deletion, and replacement of an amino acid or amino acids; the STING protein has IFN-beta signaling activity, and attenuated nuclear factor kappa-light-chain-enhancer of activated B cell (NF-κB) signaling activity, compared to human STING; and the mutation or mutations result in increased STING activity or constitutive activity in inducing IFN-beta production. Human STING protein comprises the sequence set forth in any of SEQ ID NOs:305-309, or is a human allelic variant thereof with at least 98% sequence identity to the sequence of amino acids set forth in any of SEQ ID NOs:305-309.

[0402] The modified STING proteins include modified STING proteins, where: the STING protein is a chimera comprising replacement of a C-terminal tail (CTT) region in a STING protein from a first species, with the CTT of a STING protein from a second species; the STING protein of the second species has lower NF-κB signaling activity than the NF-κB signaling activity of human STING; and the TRAF6 binding site in the CTT optionally is deleted. Provided are the protein with the TRAF6 binding site, and without the TRAF6 binding site. Mutations that correspond to those that result in constitutive type I IFN expression include mutation or mutations is/are any that correspond to those associated with the auto-inflammatory disease STING-associated vasculopathy (SAVI) inhuman.

[0403] Provided are modified Stimulator of Interferon Genes (STING) proteins that are chimeras, comprising replacement of the CTT (C-terminal tail) region in a STING protein from a first species, with the CTT of a STING protein from a second species, where: the STING protein of the second species has lower NF-κB signaling activity than the NF-κB signaling activity of human STING; and the TRAF6 binding site in the CTT optionally is deleted. The chimeras can be a human STING protein with the replaced CTT, and optional TRAF6 binding site. Exemplary human STING protein comprises the sequence set forth in any of SEQ ID NOs:305-309, or is a human allelic variant thereof with at least 98% sequence identity to the sequence of amino acids set forth in any of SEQ ID NOs:305-309. For purposes of comparison when referencing human STING protein NF-κB signaling activity, the human STING protein has the sequence set forth in any of SEQ ID NOs. 305-309, if necessary to specify a particular allele, reference is to the protein of SEQ ID NO: 305. Exemplary chimeric STING proteins include those, where the first species is human, and the second species is selected from among Tasmanian devil, marmoset, cattle, cat, ostrich, boar, bat, manatee, crested ibis, coelacanth, and ghost shark. The chimeric STING proteins can include one or more of the mutations that render activity for inducing type I IFN expression constitutive.

[0404] In selecting a non-human STING protein for use in a chimera or for modification, the type I IFN signaling activity is at least or at least about 30%, 50%, 70%, 80% or more that of a wild type human STING protein, and generally is close to or higher than the human STING. The NF-κB signaling activity is less than 30%, less than 20%, less than 15%, less than 10%, or less than 5% that of wild type human STING NF-κB signaling activity. Exemplary of non-human species or second species is selected from among Tasmanian devil, marmoset, cattle, cat, ostrich, boar, bat, manatee, crested ibis, coelacanth, and ghost shark.

[0405] The modifications of STING are referenced by alignment with human STING of SEQ ID NOs:305-309, such as SEQ ID NO:305. Mutations that render a STING constitutive include, for example, a mutation or mutations that correspond, by reference to and alignment with human STING, to a mutation that occurs in an interferonopathy, wherein the sequence of human STING with which alignment is effected is set forth in any of SEQ ID NOs:305-309. Exemplary of such mutations is N154s, R284G, and N154S/R284G, and the others listed herein or known in the art. Exemplary of modified STING proteins are those that comprise replacement of the C-terminal tail (CTT) with the CTT from a STING protein that has reduced NF-κB signaling activity compared to the NF-κB signaling activity of human STING, such as where the replacing CTT is from a Tasmanian devil, marmoset, cattle, cat, ostrich, boar, bat, manatee, crested ibis, coelacanth, or ghost shark STING protein. Exemplary of replacing CTTs are any selected from among the following species Tasmanian devil, marmoset, cattle, cat, ostrich, boar, bat, manatee, crested ibis, coelacanth, or ghost shark STING protein, and it replaces the human STING CTT. Exemplary CTT sequences include those selected from among the following species and sequences:

Tasmanian devil
SEQ ID NO: 371
RQEEFAIGPKRAMTVTTSSTLSQEPQLLISGMEQPLSLRTDGF,
Marmoset
SEQ ID NO: 372
EEEEVTVGSLKTSEVPSTSTMSQEPELLISGMEKPLPLRSDLF,
Cow
SEQ ID NO: 373
EREVTMGSTETSVMPGSSVLSQEPELLISGLEKPLPLRSDVF,
Cat
SEQ ID NO: 374
EREVTVGSVGTSMVRNPSVLSQEPNLLISGMEQPLPLRTDVF,
Ostrich
SEQ ID NO: 375
RQEEYTVCDGTLCSTDLSLQISESDLPQPLRSDCL,
Boar
SEQ ID NO: 376
EREVTMGSAETSVVPTSSTLSQEPELLISGMEQPLPLRSDIF,
Bat
SEQ ID NO: 377
EKEEVTVGTVGTYEAPGSSTLHQEPELLISGMDQPLPLRTDIF,
Manatee
SEQ ID NO: 378
EREEVTVGSVGTSVVPSPSSPSTSSLSQEPKLLISGMEQPLPLRTDVF,
Crested ibis
SEQ ID NO: 379
CHEEYTVYEGNQPHNPSTTLHSTELNLQISESDLPQPLRSDCF,
Coelacanth
(variant 1)
SEQ ID NO: 380
QKEEYFMSEQTQPNSSSTSCLSTEPQLMISDTDAPHTLKRQVC,
Coelacanth
(variant 2)
SEQ ID NO: 381
QKEEYFMSEQTQPNSSSTSCLSTEPQLMISDTDAPHTLKSGF,
and
Ghost shark
SEQ ID NO: 383
LTEYPVAEPSNANETDCMSSEPHLMISDDPKPLRSYCP,

and

[0406] allelic variants of each of these sequences, or variants having at least 98% sequence identity thereto.

[0407] The human CTT that can be replaced, comprises, for example, the sequence EKEEVTVGSLKTSAVPSTSTMSQEPELLISGMEKPLPLRTDFS (SEQ ID NO:370), or is an allelic or other variant having at least 98% sequence identity thereto. An exemplary chimeric STING is on that is a chimera in which the human STING CTT is replaced with a CTT from the Tasmanian devil STING. The chimera optionally includes a mutation or mutations rendering the type I IFN expression constitutive, where the STING protein is active in the absence of inducing ligands and/or inducing cytosolic nucleic acids. The replacing CTT from Tasmanian devil STING comprises the sequence: RQEEFAIGPKRAMTVTTSSTLSQEPQLLISGMEQPLSLRTDGF (SEQ ID NO:371), or is an allelic or other variant having at least 98% sequence identity thereto. The modified STING proteins optionally comprise deletion or disruption of the TRAF6 binding site, such as the TRAF6 binding site that comprises the amino acid residues DFS at the C-terminus as in human STING.

[0408] Modification that render activity constitutive include, for example, one or more amino acid replacements that correspond(s) to one or more of S102P, V147L, V147M, N154S, V155M, G166E, C206Y, G207E, S102P/F279L, F279L, R281Q, R284G, R284S, R284M, R284K, R284T, R197A, D205A, R310A, R293A, T294A, E296A, R197A/D205A, S272A/Q273A, R310A/E316A, E316A, E316N, E316Q, S272A, R293A/T294A/E296A, D231A, R232A, K236A, Q273A, S358A/E360A/S366A, D231A/R232A/K236A/R238A, S358A, E360A, S366A, R238A, R375A, and S324A/S326A, with reference, for alignment, to the sequence of human STING, as set forth in any of SEQ ID NOs:305-309. Exemplary of these are replacements corresponding to C206Y or R284G or N154S and combinations thereof, with reference to the sequence of human STING, as set forth in any of SEQ ID NOs:305-309.

### BRIEF DESCRIPTION OF THE FIGURES

[0409] FIGS. 1A-1C depict the inserts in plasmids pATI-1.75 and pATI-1.76 (FIGS. 1A and 1i, respectively). FIG. 1C depicts that the Shine-Dalgarno sequence is replaced with a Kozak sequence, for translation in eukaryotic cells, such as myeloid cells.

[0410] FIG. 2 depicts the alignment of wild-type human STING (SEQ ID NO:306) and Tasmanian devil STING (SEQ ID NO:349) proteins.

[0411] FIG. 3 depicts the alignment of wild-type human STING (SEQ ID NO:306) and marmoset STING (SEQ ID NO:359) proteins.

[0412] FIG. 4 depicts the alignment of wild-type human STING (SEQ ID NO:306) and cattle STING (SEQ ID NO:360) proteins.

[0413] FIG. 5 depicts the alignment of wild-type human STING (SEQ ID NO:306) and cat STING (SEQ ID NO:356) proteins.

[0414] FIG. 6 depicts the alignment of wild-type human STING (SEQ ID NO:306) and ostrich STING (SEQ ID NO:361) proteins.

[0415] FIG. 7 depicts the alignment of wild-type human STING (SEQ ID NO:306) and crested ibis STING (SEQ ID NO:362) proteins.

[0416] FIG. 8 depicts the alignment of wild-type human STING (SEQ ID NO:306) and coelacanth STING (SEQ ID NO:363) proteins.

[0417] FIG. 9 depicts the alignment of wild-type human STING (SEQ ID NO:306) and zebrafish STING (SEQ ID NO:348) proteins.

[0418] FIG. 10 depicts the alignment of wild-type human STING (SEQ ID NO:305) and boar STING (SEQ ID NO:365) proteins.

[0419] FIG. 11 depicts the alignment of wild-type human (SEQ ID NO:305) and bat STING (SEQ ID NO:366) proteins.

[0420] FIG. 12 depicts the alignment of wild-type human (SEQ ID NO:305) and manatee STING (SEQ ID NO:367) proteins.

[0421] FIG. 13 depicts the alignment of wild-type human (SEQ ID NO:305) and ghost shark STING (SEQ ID NO:368) proteins.

[0422] FIG. 14 depicts the alignment of wild-type human (SEQ ID NO:305) and mouse STING (SEQ ID NO:369) proteins.

### DETAILED DESCRIPTION

[0423] OUTLINE
[0424] A. DEFINITIONS
[0425] B. OVERVIEW OF IMMUNOSTIMULATORY BACTERIA FOR CANCER THERAPY
   [0426] 1. Bacterial Cancer Immunotherapy
   [0427] 2. Prior Therapies that Target the Tumor Microenvironment
      [0428] a. Limitations of Autologous T-Cell Therapies
      [0429] b. Viral Vaccine Platforms
      [0430] c. Bacterial Cancer Therapies
         [0431] i. Listeria
         [0432] ii. Salmonella Species
         [0433] iii. VNP20009
         [0434] iv. Wild-Type Strains
   [0435] 3. Limitations of Existing Bacterial Cancer Immunotherapies
[0436] C. MODIFICATIONS AND ENHANCEMENTS OF IMMUNOSTIMULATORY BACTERIA TO INCREASE THERAPEUTIC INDEX AND TO INCREASE ACCUMULATION IN TUMOR-RESIDENT MYELOID CELLS
   [0437] 1. Deletions in Genes in the LPS Biosynthetic Pathway
      [0438] a. msbB Deletion
      [0439] b. pagP Deletion or Inactivation
   [0440] 2. Nutrient Auxotrophy
      [0441] a. purI Deletion/Disruption
      [0442] b. Adenosine Auxotrophy
      [0443] c. Thymidine Auxotrophy
   [0444] 3. Plasmid Maintenance and Delivery
      [0445] a. asd Deletion
      [0446] b. endA Deletion/Disruption
   [0447] 4. Flagellin Knockout Strains
   [0448] 5. Engineering Bacteria to Promote Adaptive Immunity and Enhance T-Cell Function
      [0449] L-Asparaginase II (ansB) Deletion/Disruption
   [0450] 6. Deletions/Disruptions in Salmonella Genes Required to Produce Curli Fimbriae csgD Deletion
   [0451] 7. Improving Resistance to Complement Rck Expression
   [0452] 8. Deletions of Genes Required for Lipoprotein Expression in Salmonella and Other Gram-Negative Bacteria
   [0453] 9. Robust Immunostimulatory Bacteria Whose Genomes are Optimized for Anti-Tumor Therapy, and that Encode Therapeutic Products, Including a Plurality Thereof
   [0454] 10. Vaccines and Bacteria that Deliver RNA, including mRNA and other Forms of RNA, for Expression in a Eukaryotic Host
   [0455] 11. Bacterial Vaccines Against Particular Antigens, Including from Pathogens, and also from Tumors, for use as Anti-Pathogen Treatments and Vaccines, and For Anti-Cancer Treatment and/or Prevention
   [0456] 12. Conversion of M2 Phenotype Macrophages into M1 and M1-Like Phenotype Macrophages
[0457] D. IMMUNOSTIMULATORY BACTERIA WITH ENHANCED THERAPEUTIC INDEX ENCODING GENETIC PAYLOADS THAT STIMULATE THE IMMUNE RESPONSE IN THE TUMOR MICROENVIRONMENT
   [0458] 1. Immunostimulatory Proteins
      [0459] a. Cytokines and Chemokines
      [0460] b. Co-Stimulatory Molecules
   [0461] 2. Constitutively Active Proteins that Stimulate the Immune Response and/or Type I IFN, Non-Human STING Proteins, STING Chimeras, and Modified Forms
      [0462] a. Constitutive STING Expression and Gain-of-Function Mutations
      [0463] b. Constitutive IRF3 Expression and Gain-of-Function Mutations
      [0464] c. Non-Human STING Proteins, and Variants Thereof with Increased or Constitutive Activity, and STING Chimeras, and Variants Thereof with Increased or Constitutive Activity
      [0465] d. Other Gene Products that Act as Cytosolic DNA/RNA Sensors and Constitutive Variants Thereof
         [0466] i. RIG-I
         [0467] ii. MDA5/IFIH1
         [0468] iii. IRF7
      [0469] e. Other Type I IFN Regulatory Proteins
   [0470] 3. Antibodies and Antibody Fragments
      [0471] a. TGF-β
      [0472] b. Bispecific scFvs and T-Cell Engagers
      [0473] c. Anti-PD-1, Anti-PD-L1 and Anti-CTLA-4 Antibodies
         [0474] i. Anti-PD-1/Anti-PD-L1 Antibodies
         [0475] ii. Anti-CTLA-4 Antibodies
      [0476] d. Additional Exemplary Checkpoint Targets
   [0477] 4. Combinations of Immunomodulatory Proteins can have Synergistic Effects and/or Complementary Effects
   [0478] 5. Molecules that Activate Prodrugs 6. Immunostimulatory Bacteria that Deliver Combination
   [0479] Therapies
[0480] E. IMMUNOSTIMULATORY BACTERIA AS ANTIVIRAL THERAPEUTICS AND AS THERAPEUTICS AGAINST OTHER INFECTIOUS PATHOGENS
[0481] F. CONSTRUCTING EXEMPLARY PLASMIDS ENCODING THERAPEUTIC PRODUCTS FOR BACTERIAL DELIVERY
   [0482] 1. Constitutive Promoters for Heterologous Expression of Proteins
   [0483] 2. Multiple Therapeutic Product Expression Cassettes
      [0484] a. Single Promoter Constructs
      [0485] b. Dual/Multiple Promoter Constructs
   [0486] 3. Regulatory Elements
      [0487] a. Post-Transcriptional Regulatory Elements
      [0488] b. Polyadenylation Signal Sequences and Terminators
      [0489] c. Enhancers
      [0490] d. Secretion Signals
      [0491] e. Improving Bacterial Fitness
   [0492] 4. Origin of Replication and Plasmid Copy Number
   [0493] 5. CpG Motifs and CpG Islands
   [0494] 6. Plasmid Maintenance/Selection Components
   [0495] 7. DNA Nuclear Targeting Sequences
[0496] G. EXEMPLARY BACTERIAL STRAINS AND MECHANISM OF ACTION FOR USE AS VACCINES AND THERAPEUTICS
   [0497] 1. Exemplary Immunostimulatory Bacteria—In Situ Cancer Vaccination Mechanism of Action (MOA)
   [0498] 2. Exemplary Immunostimulatory Bacteria for Peripheral Cancer Vaccination and Mechanism of Action
   [0499] 3. Exemplary Immunostimulatory Bacteria for Pathogen Vaccination and MOA
[0500] H. PHARMACEUTICAL PRODUCTION, COMPOSITIONS, AND FORMULATIONS
   [0501] 1. Manufacturing
      [0502] a. Cell Bank Manufacturing
      [0503] b. Drug Substance Manufacturing
      [0504] c. Drug Product Manufacturing
   [0505] 2. Compositions
   [0506] 3. Formulations
      [0507] a. Liquids, Injectables, Emulsions
      [0508] b. Dried Thermostable Formulations
   [0509] 4. Compositions for Other Routes of Administration
   [0510] 5. Dosages and Administration
   [0511] 6. Packaging and Articles of Manufacture
[0512] I. METHODS OF TREATMENT AND USES
   [0513] 1. Diagnostics for Patient Selection for Treatment and for Monitoring Treatment
      [0514] a. Patient Selection
      [0515] b. Diagnostics to Assess or Detect Activity of the Immunostimulatory Bacteria are Indicative of the Effectiveness of Treatment
   [0516] 2. Tumors
   [0517] 3. Administration
   [0518] 4. Monitoring
[0519] J. EXAMPLES

### A. Definitions

[0520] Unless defined otherwise, all technical and scientific terms used herein have the same meaning as is commonly understood by one of skill in the art to which the invention(s) belong. All patents, patent applications, published applications and publications, GenBank sequences, databases, websites and other published materials referred to throughout the entire disclosure herein, unless noted otherwise, are incorporated by reference in their entirety. In the event that there are a plurality of definitions for terms herein, those in this section prevail. Where reference is made to a URL or other such identifier or address, it is understood that such identifiers can change and particular information on the internet can come and go, but equivalent information can be found by searching the internet. Reference thereto evidences the availability and public dissemination of such information.

[0521] As used herein, “therapeutic bacteria” are bacteria that effect therapy, such as anti-cancer or anti-tumor therapy, when administered to a subject, such as a human.

[0522] As used herein, “immunostimulatory bacteria” are therapeutic bacteria that, when introduced into a subject, accumulate in immunoprivilaged tissues and cells, such as tumors, the tumor microenvironment and tumor-resident immune cells, and replicate and/or express products that are immunostimulatory or that result in immunostimulation. For example, the immunostimulatory bacteria are attenuated in the host by virtue of reduced toxicity or pathogenicity and/or by virtue of encoded products that reduce toxicity or pathogenicity, as the immunostimulatory bacteria cannot replicate and/or express products (or have reduced replication/product expression), except primarily in immunoprivilaged environments, such as the tumor microenvironment (TME). Immunostimulatory bacteria provided herein are modified to encode a product or products, and/or to exhibit a trait or property that renders them immunostimulatory. The immunostimulatory bacteria also include genome modifications so that an endogenous product or products is/are not expressed. The bacteria can be said to be deleted in such product(s). Those of skill in the art recognize that genes can be inactivated by deletions, disruptions, including transposition or insertion of transposons, insertions, and any other changes that eliminate the gene product. This can be achieved by insertions, deletions, and/or disruptions, including transpositions or inclusion of transposons. Examples of genes that are inactivated include, for example, msbB, pagP, ansB, gene(s) encoding curli fimbriae, genes encoding flagella whereby the bacterium lacks flagella, and other modifications described herein and/or known to those of skill in the art. Those of skill in the art also understand that corresponding genes in various bacterial species may have different designations. The encoded products, properties and traits in the immunostimulatory bacteria, include, but are not limited to, for example, at least one of: an immunostimulatory protein, such as a cytokine, chemokine, or co-stimulatory molecule; a cytosolic DNA/RNA sensor or gain-of-function or constitutively active variant thereof (e.g., STING, IRF3, IRF7, MDA5, RIG-I); RNAi, such as siRNA (shRNA and microRNA), or CRISPR, that targets, disrupts, or inhibits an immune checkpoint, such as, for example, TREX1, PD-1, CTLA-4 and/or PD-L1; antibodies and fragments thereof, such as an anti-immune checkpoint antibody, an anti-IL-6 antibody, an anti-VEGF antibody, or a TGF-β inhibitory antibody; other antibody constructs, such as bi-specific T-cell engagers (BiTE® antibodies); soluble TGF-β receptors that act as decoys for binding TGF-β, or TGF-β antagonizing polypeptides; and IL-6 binding decoy receptors. Immunostimulatory bacteria also can include a modification that renders the bacteria auxotrophic for a metabolite that is immunosuppressive or that is in an immunosuppressive pathway, such as adenosine.

[0523] As used herein, the strain designations VNP20009 (see, e.g., International PCT Application Publication No. WO 99/13053, see, also U.S. Pat. No. 6,863,894), YS1646, and 41.2.9 are used interchangeably, and each refers to the strain deposited with the American Type Culture Collection (ATCC) and assigned Accession No. 202165. VNP20009 is a modified attenuated strain of Salmonella typhimurium, which contains deletions or other modifications in msbB and purI, and was generated from wild-type S. typhimurium strain ATCC #14028.

[0524] As used herein, the strain designations YS1456 and 8.7 are used interchangeably and each refer to the strain deposited with the American Type Culture Collection (ATCC) and assigned Accession No. 202164 (see, U.S. Pat. No. 6,863,894).

[0525] As used herein, recitation that a bacterium is “derived from” a particular strain means that such strain can serve as a starting material and can be modified to result in the particular bacterium.

[0526] As used herein, an “expression cassette” refers to a nucleic acid construct that includes regulatory sequences for gene expression, operatively linked to nucleic acid encoding open reading frames (ORFs) that encode payloads, such as therapeutic products, or other proteins.

[0527] As used herein, 2A peptides are 18-22 amino-acid (aa)-long viral oligopeptides that mediate cleavage of polypeptides during translation in eukaryotic cells. The designation “2A” refers to a specific region of the viral genome, and different viral 2As have generally been named after the virus they were derived from. Exemplary of these are F2A (foot-and-mouth disease virus 2A), E2A (equine rhinitis A virus), P2A (porcine teschovirus-1 2A), and T2A (Thosea asigna virus 2A). See, e.g., Liu et al. (2017) Scientific Reports 7:2193, FIG. 1, for encoding sequences. See, also, SEQ ID NOs:327-330. These peptides generally share a core sequence motif of DxExNPGP, and occur in a large number of viral families. They help break apart polyproteins by causing the ribosome to fail at making a peptide bond. The 2A peptides provide for multicistronic/polycistronic vectors, in which a plurality of proteins are expressed from a single open reading frame (ORF). For purposes herein, the 2A peptides include those that are naturally occurring, and any modified forms thereof, such as any having at least 97%, 98%, or 99% sequence identity with any naturally-occurring 2A peptide, including those disclosed herein, that result in single polypeptides being transcribed and translated from a transcript comprising a plurality (2 or more) of open reading frames.

[0528] As used herein, an “interferonopathy” refers to a disorder associated with an upregulation of interferon by virtue of a mutation in a gene product involved in a pathway that regulates or induces expression of interferon. The activity of the products normally is regulated by a mediator, such as cytosolic DNA or RNA or nucleotides; when the protein product is mutated, the activity is constitutive. Type I interferonopathies include a spectrum of conditions, including the severe forms of Aicardi-Goutières Syndrome (AGS), and the milder Familial Chilblain Lupus (FCL). Nucleic acid molecules encoding mutated products with these properties can be produced in vitro, such as by selecting for mutations that result in a gain-of-function in the product, compared to the product of an allele that has normal activity, or has further gain-of-function compared to the disease-associated gain-of-function mutants described herein.

[0529] As used herein, a “gain-of-function mutation” is one that increases the activity of a protein compared to the same protein that does not have the mutation. For example, if the protein is a receptor, it will have increased affinity for a ligand; if it is an enzyme, it will have increased activity, including constitutive activity. In particular, with respect to products, such as STING, IRF3, IRF7, MDA5, RIG-I, a constitutively active product is one that is active in the absence of a its activating ligands, such as cGAS for STING, and/or in the absence of cytosolic nucleic acids, such as DNA, RNA, nucleotides, dinucleotides, cyclic nucleotides and/or cyclic dinucleotides or other nucleic acid molecules, that lead to production of type I interferon. These nucleic acid molecules in the cytosol occur from viral or bacterial infection and/or radiation or other such exposure, leading to activation of an immune response in a host against such pathogen.

[0530] As used herein, an “origin of replication” is a sequence of DNA at which replication is initiated on a chromosome, or a plasmid, or in a virus. For small DNA, including bacterial plasmids and small viruses, a single origin is sufficient.

[0531] The origin of replication determines the vector copy number, which depends upon the selected origin of replication. For example, if the expression vector is derived from the low-copy-number plasmid pBR322, the copy number is between about 15-20 copies/cell, and if derived from the high-copy-number plasmid pUC, it can be 500-700 copies/cell. As used herein, medium copy number of a plasmid in cells is about or is 150 or less than 150, and low copy number is 5-30, such as 20 or less than 20. Low to medium copy number is less than 150 copies/cell. High copy number is greater than 150 copies/cell.

[0532] As used herein, a “CpG motif” is a pattern of bases that includes an unmethylated central CpG (“p” refers to the phosphodiester link between consecutive C and G nucleotides), surrounded by at least one base flanking (on the 3′ and the 5′ side of) the central CpG. A CpG oligodeoxynucleotide is an oligodeoxynucleotide that is at least about ten nucleotides in length and includes an unmethylated CpG. At least the C of the 5′ CG 3′ is unmethylated.

[0533] As used herein, a “RIG-I binding sequence” refers to a 5′triphosphate (5′ppp) structure directly, or that which is synthesized by RNA polymerase III from a poly(dA-dT) sequence, which, by virtue of interaction with RIG-I, can activate type I IFN via the RIG-I pathway. The RNA includes at least four A ribonucleotides (A-A-A-A); it can contain 4, 5, 6, 7, 8, 9, 10, or more. The RIG-I binding sequence is introduced into a plasmid in the bacterium for transcription into the poly(A).

[0534] As used herein, “cytokines” are a broad and loose category of small proteins (˜5-20 kDa) that are important in cell signaling. Cytokines include chemokines, interferons, interleukins, lymphokines, and tumor necrosis factors. Cytokines are cell signaling molecules that aid cell to cell communication in immune responses, and stimulate the movement of cells towards sites of inflammation, infection and trauma.

[0535] As used herein, “chemokines” refer to chemoattractant (chemotactic) cytokines that bind to chemokine receptors and include proteins isolated from natural sources as well as those made synthetically, as by recombinant means or by chemical synthesis. Exemplary chemokines include, but are not limited to, IL-8, IL-10, GCP-2, GRO-α, GRO-β, GRO-γ, ENA-78, PBP, CTAP III, NAP-2, LAPF-4, MIG (CXCL9), CXCL10 (IP-10), CXCL11, PF4, SDF-1α, SDF-1β, SDF-2, MCP-1, MCP-2, MCP-3, MCP-4, MCP-5, MIP-1α (CCL3), MIP-1β (CCL4), MIP-1γ (CCL9), MIP-2, MIP-2α, MIP-3α, MIP-30, MIP-4, MIP-5, MDC, HCC-1, ALP, Lungkine, TIM-1, Eotaxin-1, Eotaxin-2, I-309, SCYA17, TRAC, RANTES (CCL5), DC-CK-1, lymphotactin, and fractalkine, and others known to those of skill in the art. Chemokines are involved in the migration of immune cells to sites of inflammation, as well as in the maturation of immune cells, and in the generation of adaptive immune responses.

[0536] As used herein, an “immunostimulatory protein” is a protein that exhibits or promotes an anti-tumor immune response in the tumor microenvironment. Exemplary of such proteins are cytokines, chemokines, and co-stimulatory molecules, such as, but not limited to, IFN-α, IFN-β, GM-CSF, IL-2, IL-7, IL-12, IL-15, IL-18, IL-21, IL-23, IL-12p70 (IL-12p40+IL-12p35), IL-15/IL-15R alpha chain complex (also referred to herein as IL-15/IL-15Rα, IL-15Rα-IL-15sc, IL-15 complex, and other variations, set forth herein), IL-36 gamma, IL-2 that has attenuated binding to IL-2Ra, IL-2 that is modified so that it does not bind to IL-2Ra, CXCL9, CXCL10 (IP-10), CXCL11, CCL3, CCL4, CCL5, molecules involved in the potential recruitment and/or persistence of T-cells, CD40, CD40 ligand (CD40L), OX40, OX40 ligand (OX40L), 4-1BB, 4-1BB ligand (4-1BBL), 4-1BBL with a deleted cytoplasmic domain (1BBLΔcyt), or with a partially deleted (truncated) cytoplasmic domain, members of the B7-CD28 family, and members of the tumor necrosis factor receptor (TNFR) superfamily.

[0537] Among the immunostimulatory proteins are truncated co-stimulatory molecules, such as, for example, 4-1BBL, CD80, CD86, CD27L, B7RP1 and OX40L, each with a full or partial cytoplasmic domain deletion, for expression on an antigen-presenting cell (APC). These truncated gene products, such as those with deletions or partial deletions of the cytoplasmic domain, are truncated such that they are capable of constitutive immunostimulatory signaling to a T-cell through co-stimulatory receptor engagement, but are unable to counter-regulatory signal to the APC, due to a deleted or truncated cytoplasmic domain.

[0538] As used herein, a “cytoplasmic domain deletion” is a deletion in all, or a portion of, the amino acid residues that comprise the cytoplasmic, or intracellular, domain of the protein, where the deletion is sufficient to effect constitutive immunostimulatory signaling to a T-cell through co-stimulatory receptor engagement, and is sufficient to inhibit counter-regulatory signaling to the APC. For example, the cytoplasmic domain of human 4-1BBL (also known as TNFSF9) comprises amino acid residues 1-28 of SEQ ID NO:342. The cytoplasmic domain of human CD80 comprises amino acid residues 264-288 of the protein; the cytoplasmic domain of human CD86 comprises amino acid residues 269-329 of the protein; the cytoplasmic domain of human CD27L (also known as CD70) comprises amino acid residues 1-17 of the protein; the cytoplasmic domain of human B7RP1 (also known as ICOSLG or ICOS ligand) comprises amino acid residues 278-302 of the protein; and the cytoplasmic domain of human OX40L (also known as TNFSF4 or CD252) comprises amino acid residues 1-23 of the protein.

[0539] As used herein, a “decoy receptor” is a receptor that can specifically bind to specific growth factors or cytokines efficiently, but is not structurally able to signal or activate the intended receptor complex. The decoy receptor acts as an inhibitor by binding to a ligand and preventing it from binding to its cognate receptor.

[0540] For example, TGF-β family receptors include the cell-surface serine/threonine kinase receptors type I (TβRI or TGFβR1) and type II (TβRII or TGFβR2), which form heteromeric complexes in the presence of dimerized ligands, as well as the type III receptor betaglycan (TβRIII or TGFβR3). Soluble decoy receptors for TGF-β, which prevent the binding of TGF-β to its receptors, include the soluble extracellular domains (the TGF-β binding regions) of TβRI, TβRII, or TβRIII (β-glycan), which can be fused with other molecules, such as an Fc domain. Additionally, BAMBI (bone morphogenetic protein (BMP) and activin membrane-bound inhibitor) is structurally related to type I receptors and acts as a decoy that inhibits receptor activation. A dominant negative TGFβR2 (dnTGFβRII), which comprises the extracellular domain of TGFβR2 and the transmembrane region, but which lacks the cytoplasmic domain required for signaling, also can be used as a TGF-β decoy receptor (see, e.g., International Application Publication No. WO 2018/138003).

[0541] As used herein, a co-stimulatory molecule agonist is a molecule that, upon binding to the co-stimulatory molecule, activates it or increases its activity. For example, the agonist can be an agonist antibody. CD40 agonist antibodies include, for example, CP-870,893, dacetuzumab, ADC-1013 (mitazalimab), and Chi Lob 7/4.

[0542] As used herein, a cytosolic DNA/RNA sensor pathway is one that is initiated by the presence of DNA, RNA, nucleotides, dinucleotides, cyclic nucleotides and/or cyclic dinucleotides or other nucleic acid molecules, that leads to production of type I interferon. The nucleic acid molecules in the cytosol occur from viral or bacterial or radiation or other such exposure, leading to activation of an immune response in a host.

[0543] As used herein, a “type I interferon pathway protein” is a protein that induces an innate immune response, such as the induction of type I interferon.

[0544] As used herein, a “cytosolic DNA/RNA sensor,” is a protein that is part of a cytosolic DNA/RNA sensor pathway that leads to expression of an immune response mediator, such as type I interferon. A “cytosolic DNA/RNA sensor,” includes type I interferon pathway proteins. For example, as described herein and known to those of skill in the art, cytosolic DNA is sensed by cGAS, leading to the production of cGAMP and subsequent STING/TBK1/IRF3 signaling, and type I IFN production. Bacterial cyclic dinucleotides (CDNs, such as bacterial cyclic di-AMP) also activate STING. Hence, STING is an immunomodulatory protein that induces type I interferon. 5′-triphosphate RNA and double stranded RNA are sensed by RIG-I and either MDA-5 alone, or MDA-5/LGP2. This leads to polymerization of mitochondrial MAVS (mitochondrial antiviral-signaling protein), and also activates TANK-binding kinase 1 (TBK1) and interferon regulatory factor 3 (IRF3). The proteins in such pathways are immunostimulatory proteins, and lead to the expression of innate immune response mediators, such as type I interferon. The immunomodulatory proteins in the DNA/RNA sensor pathways can be modified so that they have increased activity, or act constitutively in the absence of cytosolic nucleic acids and/or activating/stimulating ligands, to lead to the immune response, such as the expression of type I interferon.

[0545] As used herein, the “carboxy-terminal tail” or “C-terminal tail” (CTT) of the innate immune protein STING refers to the C-terminal portion of a STING protein that, in a wild-type STING protein, is tethered to the cGAMP-binding domain by a flexible linker region. The CTT includes an IRF3 binding site, a TBK1 binding site, and a TRAF6 binding site. STING promotes the induction of interferon beta (IFN-β) production via the phosphorylation of the STING protein C-terminal tail (CTT) by TANK-binding kinase 1 (TBK1). The interaction between STING and TBK1 is mediated by an evolutionarily conserved stretch of eight amino-acid residues in the carboxy-terminal tail (CTT) of STING. TRAF6 catalyzes the formation of K63-linked ubiquitin chains on STING, leading to the activation of the transcription factor NF-κB and the induction of an alternative STING-dependent gene expression program. Deletion or disruption of the TRAF6 binding site in the CTT can reduce activation of NF-κB signaling. Substitution of the human STING CTT (or portions thereof), with the CTT (or corresponding portion thereof) from the STING protein of a species with low NF-κB activation, can decrease the NF-κB activation by the resulting modified human STING protein. The STING CTT is an unstructured stretch of ˜40 amino acids that contains sequence motifs required for STING phosphorylation and recruitment of IRF3 (see, de Oliveira Mann et al. (2019) Cell Reports 27:1165-1175). Human STING residue S366 has been identified as a primary TBK1 phosphorylation site that is part of an LxIS motif shared among innate immune adaptor proteins that activate interferon signaling (see, de Oliveira Mann et al. (2019) Cell Reports 27:1165-1175). The human STING CTT contains a second PxPLR motif that includes the residue L374, which is required for TBK1 binding; the LxIS and PxPLR sequences are conserved among vertebrate STING alleles (see, de Oliveira Mann et al. (2019) Cell Reports 27:1165-1175). Exemplary STING CTT sequences, and the IRF3, TBK1, and TRAF6 binding sites, are set forth in the following table:

| | | SEQ | IRF3 | TBK1 | TRAF6 |
|---|---|---|---|---|---|
| | C-Terminal Tail (CTT) | ID | Binding | Binding | Binding |
| Species | Sequence | NO. | Site | Site | Site |
| Human | EKEEVTVGSLKTSAVPSTSTMS | 370 | PELLIS | PLPLRT | DFS |
| | QEPELLISGMEKPLPLRTDFS | | | | |
| Tasmanian | RQEEFAIGPKRAMTVTTSSTLS | 371 | PQLLIS | PLSLRT | DGF |
| devil | QEPQLLISGMEQPLSLRTDGF | | | | |
| Marmoset | EEEEVTVGSLKTSEVPSTSTMS | 372 | PELLIS | PLPLRS | DLF |
| | QEPELLISGMEKPLPLRSDLF | | | | |
| Cattle | EREVTMGSTETSVMPGSSVLS | 373 | PELLIS | PLPLRS | DVF |
| | QEPELLISGLEKPLPLRSDVF | | | | |
| Cat | EREVTVGSVGTSMVRNPSVLS | 374 | PNLLIS | PLPLRT | DVF |
| | QEPNLLISGMEQPLPLRTDVF | | | | |
| Ostrich | RQEEYTVCDGTLCSTDLSLQIS | 375 | LSLQIS | PQPLRS | DCL |
| | ESDLPQPLRSDCL | | | | |
| Boar | EREVTMGSAETSVVPTSSTLSQ | 376 | PELLIS | PLPLRS | DIF |
| | EPELLISGMEQPLPLRSDIF | | | | |
| Bat | EKEEVTVGTVGTYEAPGSSTL | 377 | PELLIS | PLPLRT | DIF |
| | HQEPELLISGMDQPLPLRTDIF | | | | |
| Manatee | EREEVTVGSVGTSVVPSPSSPS | 378 | PKLLIS | PLPLRT | DVF |
| | TSSLSQEPKLLISGMEQPLPLRT | | | | |
| | DVF | | | | |
| Crested ibis | CHECEYTVYEGNQPHNPSTTLH | 379 | LNLQIS | PQPLRS | DCF |
| | STELNLQISESDLPQPLRSDCF | | | | |
| Coelacanth | QKEEYFMSEQTQPNSSSTSCLS | 380 | PQLMIS | PHTLKR | QVC |
| (variant 1) | TEPQLMISDTDAPHTLKRQVC | | | | |
| Coelacanth | QKEEYFMSEQTQPNSSSTSCLS | 381 | PQLMIS | PHTLKS | GF |
| (variant 2) | TEPQLMISDTDAPHTLKSGF | | | | |
| Zebrafish | DGEIFMDPTNEVHPVPEEGPV | 382 | PTLMFS | PQSLRS | EPVETTDY |
| | GNCNGALQATFHEEPMSDEPT | | | | |
| | LMFSRPQSLRSEPVETTDYFNP | | | | |
| | SSAMKQN | | | | |
| Ghost | LTEYPVAEPSNANETDCMSSE | 383 | PHLMIS | PKPLRS | YCP |
| shark | PHLMISDDPKPLRSYCP | | | | |
| Mouse | EKEEVTMNAPMTSVAPPPSVL | 384 | PRLLIS | PLPLRT | DLI |
| | SQEPRLLISGMDQPLPLRTDLI | | | | |

[0546] As used herein, a bacterium that is modified so that it “induces less cell death in tumor-resident immune cells” or “induces less cell death in immune cells” is one that is less toxic than the bacterium without the modification, or one that has reduced virulence compared to the bacterium without the modification. Exemplary of such modifications are those that eliminate pyroptosis in phagocytic cells and that alter lipopolysaccharide (LPS) profiles on the bacterium. These modifications include disruption of or deletion of flagellin genes, pagP, or one or more components of the SPI-1 pathway, such as hilA, rod protein (e.g., prgJ), needle protein (e.g., prgI), and QseC.

[0547] As used herein, a bacterium that is “modified so that it preferentially infects tumor-resident immune cells” ˜ or “modified so that it preferentially infects immune cells” has a modification in its genome that reduces its ability to infect cells other than immune cells. Exemplary of such modifications are modifications that disrupt the type III secretion system or type IV secretion system or other genes or systems that affect the ability of a bacterium to invade a non-immune cell. For example, modifications include disruption/deletion of an SPI-1 component, which is needed for infection of cells, such as epithelial cells, but does not affect infection of immune cells, such as phagocytic cells, by Salmonella.

[0548] As used herein, a “modification” is in reference to modification of a sequence of amino acids of a polypeptide, or a sequence of nucleotides in a nucleic acid molecule, and includes deletions, insertions, and replacements of amino acids or nucleotides, respectively. Methods of modifying a polypeptide are routine to those of skill in the art, such as by using recombinant DNA methodologies.

[0549] As used herein, a modification to a bacterial genome, or to a plasmid, or to a gene, includes deletions, replacements, and insertions of nucleic acid.

[0550] As used herein, RNA interference (RNAi) is a biological process in which RNA molecules inhibit gene expression or translation, by neutralizing targeted mRNA molecules to inhibit translation, and thereby expression, of a targeted gene.

[0551] As used herein, RNA molecules that act via RNAi are referred to as inhibitory by virtue of their silencing of the expression of a targeted gene. Silencing expression means that expression of the targeted gene is reduced, or suppressed, or inhibited.

[0552] As used herein, gene silencing via RNAi is said to inhibit, suppress, disrupt, or silence expression of a targeted gene. A targeted gene contains sequences of nucleotides that correspond to the sequences in the inhibitory RNA, whereby the inhibitory RNA silences expression of target mRNA.

[0553] As used herein, inhibiting, suppressing, disrupting, or silencing a targeted gene, refers to processes that alter expression, such as translation, of the targeted gene, whereby activity or expression of the product encoded by the targeted gene is reduced. Reduction, includes a complete knock-out or a partial knockout, whereby, with reference to the immunostimulatory bacteria provided herein and administration herein, treatment is effected.

[0554] As used herein, small interfering RNAs (siRNAs) are small pieces of double-stranded (ds) RNA, usually about 21 nucleotides long, with 3′ overhangs (2 nucleotides) at each end that can be used to “interfere” with the translation of proteins by binding to and promoting the degradation of messenger RNA (mRNA) at specific sequences. In doing so, siRNAs prevent the production of specific proteins based on the nucleotide sequences of their corresponding mRNAs. The process is called RNA interference (RNAi), and also is referred to as siRNA silencing, or siRNA knockdown.

[0555] As used herein, a short-hairpin RNA or small-hairpin RNA (shRNA) is an artificial RNA molecule with a tight hairpin turn that can be used to silence target gene expression via RNA interference (RNAi). Expression of shRNA in cells is typically accomplished by delivery of plasmids, or through viral or bacterial vectors.

[0556] As used herein, a tumor microenvironment (TME) is the cellular environment in which the tumor exists, including surrounding blood vessels, immune cells, fibroblasts, bone marrow-derived inflammatory cells, lymphocytes, signaling molecules and the extracellular matrix (ECM). Conditions that exist include, but are not limited to, increased vascularization, hypoxia, low pH, increased lactate concentration, increased pyruvate concentration, increased interstitial fluid pressure, and altered metabolites or metabolism, such as higher levels of adenosine, which are indicative of a tumor.

[0557] As used herein, an immune desert tumor or immune-excluded tumor is a tumor devoid of tumor infiltrating T-cells. Immune desert tumors are solid tumors where minimal effector immune cells infiltrate the tumor and there is a lack of immune response present in the tumor. Desert tumors are devoid tumor-infiltrating lymphocytes, CD8+ T-cells are absent from the tumor, including the parenchyma, stroma, and tumor periphery.

[0558] As used herein, “bactofection” refers to the bacteria-mediated transfer of genes or plasmid DNA into eukaryotic cells, such as mammalian cells.

[0559] As used herein, human type I interferons (IFNs) are a subgroup of interferon proteins that regulate the activity of the immune system. All type I IFNs bind to a specific cell surface receptor complex, such as the IFN-α receptor. Type I interferons include IFN-α and IFN-β, among others. Myeloid cells are the primary producers of IFN-α and IFN-β, which have antiviral activity that is involved mainly in innate immune responses. Two types of IFN-β are IFN-β1 (IFNB1) and IFN-β3 (IFNB3).

[0560] As used herein, “M1 macrophage phenotype” and “M2 macrophage phenotype” refer to the two broad groups into which macrophage phenotypes are divided: M1 (classically activated macrophages) and M2 (alternatively activated macrophages). The role of M1 macrophages is to secrete pro-inflammatory cytokines and chemokines, and to present antigens, so that they participate in the positive immune response, and function as an immune monitor. The main pro-inflammatory cytokines they produce are IL-6, IL-12, and TNF-alpha. M2 macrophages primarily secrete arginase-I, IL-10, TGF-β, and other anti-inflammatory cytokines, which have the function of reducing inflammation, and contributing to tumor growth and immunosuppressive function. A macrophage with an M1-like phenotype secretes pro-inflammatory cytokines, and does not have the immunosuppressive activity(ies) of an M2 macrophage. Conversion of an M2 macrophage into a macrophage with an M1 or M1-like phenotype converts an M2 macrophage into one that is not immunosuppressive, but participates in an anti-tumor response. An M2 macrophage that is converted into a macrophage with an M1 or M1-like phenotype exhibits the secretion/expression of more pro-inflammatory cytokines/chemokines and receptors, such as CD80 and CCR7, and chemokines, such as IFNγ and CXCL10. M1 phenotypic markers include, but are not limited to, one or more of CD80, CD86, CD64, CD16, and CD32. The expression of nitric oxide synthase (iNOS) in M1 macrophages also can serve as a phenotypic marker. CD163 and CD206 are major markers for the identification of M2 macrophages. Other surface markers for M2-type cells also include CD68. A reduction or elimination of any of the M2 markers, and an increase in cytokines/chemokines that are indicative of M1 macrophages, reflect a conversion from an M2 phenotype into an M1 or M1-like phenotype. The sections below, and the working examples regarding M2 to M1-like or M1 phenotype conversion, describe exemplary cytokine profiles and markers that are induced.

[0561] As used herein, recitation that a nucleic acid or encoded RNA targets a gene means that it inhibits or suppresses or silences expression of the gene by any mechanism. Generally, such nucleic acid includes at least a portion complementary to the targeted gene, where the portion is sufficient to form a hybrid with the complementary portion.

[0562] As used herein, “deletion,” when referring to a nucleic acid or polypeptide sequence, refers to the deletion of one or more nucleotides or amino acids compared to a sequence, such as a target polynucleotide, or polypeptide, or a native or wild-type sequence.

[0563] As used herein, “insertion,” when referring to a nucleic acid or amino acid sequence, describes the inclusion of one or more additional nucleotides or amino acids, within a target, native, wild-type or other related sequence. Thus, a nucleic acid molecule that contains one or more insertions compared to a wild-type sequence, contains one or more additional nucleotides within the linear length of the sequence.

[0564] As used herein, “additions” to nucleic acid and amino acid sequences describe addition of nucleotides or amino acids onto either termini compared to another sequence.

[0565] As used herein, “substitution” or “replacement” refers to the replacing of one or more nucleotides or amino acids in a native, target, wild-type or other nucleic acid or polypeptide sequence with an alternative nucleotide or amino acid, without changing the length (as described in numbers of nucleotides or residues) of the molecule. Thus, one or more substitutions in a molecule does not change the number of nucleotides or amino acid residues of the molecule. Amino acid replacements compared to a particular polypeptide can be expressed in terms of the number of the amino acid residue along the length of the polypeptide sequence.

[0566] As used herein, “at a position corresponding to,” or recitation that nucleotides or amino acid positions “correspond to” nucleotides or amino acid positions in a disclosed sequence, such as set forth in the Sequence Listing, refers to nucleotides or amino acid positions identified upon alignment with the disclosed sequence to maximize identity using a standard alignment algorithm, such as the GAP algorithm. By aligning the sequences, one skilled in the art can identify corresponding residues, for example, using conserved and identical amino acid residues as guides. In general, to identify corresponding positions, the sequences of amino acids are aligned so that the highest order match is obtained (see, e.g., Computational Molecular Biology, Lesk, A. M., ed., Oxford University Press, New York, 1988; Biocomputing: Informatics and Genome Projects, Smith, D. W., ed., Academic Press, New York, 1993; Computer Analysis of Sequence Data, Part I, Griffin, A. M., and Griffin, H. G., eds., Humana Press, New Jersey, 1994; Sequence Analysis in Molecular Biology, von Heinje, G., Academic Press, 1987; Sequence Analysis Primer, Gribskov, M. and Devereux, J., eds., M Stockton Press, New York, 1991; and Carrillo et al. (1988) SIAM J. Applied Math 48:1073).

[0567] As used herein, alignment of a sequence refers to the use of homology to align two or more sequences of nucleotides or amino acids. Typically, two or more sequences that are related by 50% or more identity are aligned. An aligned set of sequences refers to 2 or more sequences that are aligned at corresponding positions and can include aligning sequences derived from RNAs, such as ESTs and other cDNAs, aligned with a genomic DNA sequence. Related or variant polypeptides or nucleic acid molecules can be aligned by any method known to those of skill in the art. Such methods typically maximize matches, and include methods, such as using manual alignments, and by using the numerous alignment programs available (e.g., BLASTP) and others known to those of skill in the art. By aligning the sequences of polypeptides or nucleic acids, one skilled in the art can identify analogous portions or positions, using conserved and identical amino acid residues as guides. Further, one skilled in the art also can employ conserved amino acid or nucleotide residues as guides to find corresponding amino acid or nucleotide residues between and among human and non-human sequences. Corresponding positions also can be based on structural alignments, for example by using computer simulated alignments of protein structure. In other instances, corresponding regions can be identified. One skilled in the art also can employ conserved amino acid residues as guides to find corresponding amino acid residues between and among human and non-human sequences.

[0568] As used herein, a “property” of a polypeptide, such as an antibody, refers to any property exhibited by a polypeptide, including, but not limited to, binding specificity, structural configuration or conformation, protein stability, resistance to proteolysis, conformational stability, thermal tolerance, and tolerance to pH conditions. Changes in properties can alter an “activity” of the polypeptide. For example, a change in the binding specificity of the antibody polypeptide can alter the ability to bind an antigen, and/or various binding activities, such as affinity or avidity, or in vivo activities of the polypeptide.

[0569] As used herein, an “activity” or a “functional activity” of a polypeptide, such as an antibody, refers to any activity exhibited by the polypeptide. Such activities can be empirically determined. Exemplary activities include, but are not limited to, the ability to interact with a biomolecule, for example, through antigen-binding, DNA binding, ligand binding, or dimerization, or enzymatic activity, for example, kinase activity, or proteolytic activity. For an antibody (including antibody fragments), activities include, but are not limited to, the ability to specifically bind a particular antigen, affinity of antigen-binding (e.g., high or low affinity), avidity of antigen-binding (e.g., high or low avidity), on-rate, off-rate, effector functions, such as the ability to promote antigen neutralization or clearance, virus neutralization, and in vivo activities, such as the ability to prevent infection or invasion of a pathogen, or to promote clearance, or to penetrate a particular tissue or fluid or cell in the body. Activity can be assessed in vitro or in vivo using recognized assays, such as ELISA, flow cytometry, surface plasmon resonance or equivalent assays to measure on-rate or off-rate, immunohistochemistry and immunofluorescence histology and microscopy, cell-based assays, and binding assays (e.g., panning assays).

[0570] As used herein, “bind,” “bound,” or grammatical variations thereof, refers to the participation of a molecule in any attractive interaction with another molecule, resulting in a stable association in which the two molecules are in close proximity to one another. Binding includes, but is not limited to, non-covalent bonds, covalent bonds (such as reversible and irreversible covalent bonds), and includes interactions between molecules such as, but not limited to, proteins, nucleic acids, carbohydrates, lipids, and small molecules, such as chemical compounds, including drugs.

[0571] As used herein, “antibody” refers to immunoglobulins and immunoglobulin fragments, whether natural, or partially or wholly synthetically, such as recombinantly produced, including any fragment thereof containing at least a portion of the variable heavy chain and light region of the immunoglobulin molecule that is sufficient to form an antigen-binding site and, when assembled, to specifically bind an antigen. Hence, an antibody includes any protein having a binding domain that is homologous or substantially homologous to an immunoglobulin antigen-binding domain (antibody combining site). For example, an antibody refers to an antibody that contains two heavy chains (which can be denoted H and H′) and two light chains (which can be denoted L and L′), where each heavy chain can be a full-length immunoglobulin heavy chain or a portion thereof sufficient to form an antigen-binding site (e.g., heavy chains include, but are not limited to, V_{H} chains, V_{H}-CH1 chains and V_{H}-CH1-CH2-C_{H}3 chains), and each light chain can be a full-length light chain or a portion thereof sufficient to form an antigen-binding site (e.g., light chains include, but are not limited to, V_{L} chains and V_{L}-CL chains). Each heavy chain (H and H′) pairs with one light chain (L and L′, respectively). Typically, antibodies minimally include all or at least a portion of the variable heavy (V_{H}) chain and/or the variable light (V_{L}) chain. The antibody also can include all or a portion of the constant region.

[0572] For purposes herein, the term antibody includes full-length antibodies and portions thereof including antibody fragments, such as anti-CTLA-4 antibody fragments. Antibody fragments, include, but are not limited to, Fab fragments, Fab′ fragments, F(ab′)₂ fragments, Fv fragments, disulfide-linked Fvs (dsFvs), Fd fragments, Fd′ fragments, single-chain Fvs (scFvs), single-chain Fabs (scFabs), diabodies, anti-idiotypic (anti-Id) antibodies, or antigen-binding fragments of any of the above. Antibody also includes synthetic antibodies, recombinantly produced antibodies, multi-specific antibodies (e.g., bispecific antibodies), human antibodies, non-human antibodies, humanized antibodies, chimeric antibodies, and intrabodies. Antibodies provided herein include members of any immunoglobulin class (e.g., IgG, IgM, IgD, IgE, IgA and IgY), any subclass (e.g., IgG1, IgG2, IgG3, IgG4, IgA1, and IgA2), or sub-subclass (e.g., IgG2a and IgG2b). Antibodies for human therapy generally are human antibodies or are humanized.

[0573] As used herein, “antibody fragment(s)” refers to (i) monovalent and monospecific antibody derivatives that contain the variable heavy and/or light chains, or functional fragments of an antibody, and that lack an Fc part; and (ii) BiTE® antibodies (such as tandem scFvs), dual-affinity re-targeting antibodies (DARTs), other dimeric and multimeric antibodies, diabodies, and single-chain diabodies (scDBs). Thus, an antibody fragment includes, for example, a/an: Fab, Fab′, scFab, scFv, Fv fragment, nanobody (see, e.g., antibodies derived from Camelus bactriamus, Camelus dromedarius, or Lama pacos) (see, e.g., U.S. Pat. No. 5,759,808; and Stijlemans et al. (2004) J. Biol. Chem. 279:1256-1261), V_{HH}, single-domain antibody (dAb or sdAb), minimal recognition unit, single-chain diabody (scDb), BiTE® antibody, and DART antibody, and other antibody constructs that bind to antigens. Typically, the recited antibody fragments have a molecular weight below 60 kDa.

[0574] As used herein, “nucleic acid” refers to at least two linked nucleotides or nucleotide derivatives, including a deoxyribonucleic acid (DNA) and a ribonucleic acid (RNA), joined together, typically by phosphodiester linkages. Also included in the term “nucleic acid” are analogs of nucleic acids, such as peptide nucleic acid (PNA), phosphorothioate DNA, and other such analogs and derivatives, or combinations thereof. Nucleic acids also include DNA and RNA derivatives containing, for example, a nucleotide analog or a “backbone” bond other than a phosphodiester bond, for example, a phosphotriester bond, a phosphoramidate bond, a phosphorothioate bond, a thioester bond, or a peptide bond (peptide nucleic acid). The term also includes equivalents, derivatives, variants, and analogs of either RNA or DNA made from nucleotide analogs, and single-stranded (sense or antisense) and double-stranded nucleic acids. Deoxyribonucleotides include deoxyadenosine, deoxycytidine, deoxyguanosine, and deoxythymidine. For RNA, the uracil base is uridine.

[0575] As used herein, an isolated nucleic acid molecule is one which is separated from other nucleic acid molecules which are present in the natural source of the nucleic acid molecule. An “isolated” nucleic acid molecule, such as a cDNA molecule, can be substantially free of other cellular material, or culture medium when produced by recombinant techniques, or substantially free of chemical precursors or other chemicals when chemically synthesized. Exemplary isolated nucleic acid molecules provided herein include isolated nucleic acid molecules encoding an antibody or antigen-binding fragments provided herein.

[0576] As used herein, “operably linked” or “operatively linked,” with reference to nucleic acid sequences, regions, elements, or domains, means that the nucleic acid regions are functionally related to each other. It refers to a juxtaposition whereby the components so described are in a relationship permitting them to function in their intended manner. For instance, a promoter is operably linked to a coding sequence if the promoter effects or affects its transcription or expression. For example, a nucleic acid encoding a leader peptide can be operably linked to a nucleic acid encoding a polypeptide, whereby the nucleic acids can be transcribed and translated to express a functional fusion protein, wherein the leader peptide effects secretion of the fusion polypeptide. In some instances, the nucleic acid encoding a first polypeptide (e.g., a leader peptide) is operably linked to a nucleic acid encoding a second polypeptide, and the nucleic acids are transcribed as a single mRNA transcript, but translation of the mRNA transcript can result in one of two polypeptides being expressed. For example, an amber stop codon can be located between the nucleic acid encoding the first polypeptide and the nucleic acid encoding the second polypeptide, such that, when introduced into a partial amber suppressor cell, the resulting single mRNA transcript can be translated to produce either a fusion protein containing the first and second polypeptides, or can be translated to produce only the first polypeptide. In another example, a promoter can be operably linked to nucleic acid encoding a polypeptide, whereby the promoter regulates or mediates the transcription of the nucleic acid.

[0577] As used herein, “synthetic,” with reference to, for example, a synthetic nucleic acid molecule, or a synthetic gene, or a synthetic peptide, refers to a nucleic acid molecule, or a gene, or a polypeptide molecule that is produced by recombinant methods and/or by chemical synthesis methods.

[0578] As used herein, the residues of naturally occurring α-amino acids are the residues of those 20 α-amino acids found in nature which are incorporated into a protein by the specific recognition of the charged tRNA molecule with its cognate mRNA codon in humans.

[0579] As used herein, a “polypeptide” refers to two or more amino acids covalently joined. The terms “polypeptide” and “protein” are used interchangeably herein.

[0580] As used herein, a “peptide” refers to a polypeptide that is from 2 to about or 40 amino acids in length.

[0581] As used herein, an “amino acid” is an organic compound containing an amino group and a carboxylic acid group. A polypeptide contains two or more amino acids. For purposes herein, amino acids contained in the antibodies and immunostimulatory proteins provided herein, include the twenty naturally-occurring amino acids (see Table of Correspondence below), non-natural amino acids, and amino acid analogs (e.g., amino acids wherein the α-carbon has a side chain). As used herein, the amino acids, which occur in the various amino acid sequences of polypeptides appearing herein, are identified according to their well-known, three-letter or one-letter abbreviations (see Table of Correspondence below). The nucleotides, which occur in the various nucleic acid molecules and fragments, are designated with the standard single-letter designations used routinely in the art.

[0582] As used herein, “amino acid residue” refers to an amino acid formed upon chemical digestion (hydrolysis) of a polypeptide at its peptide linkages. The amino acid residues described herein are generally in the “L” isomeric form. Residues in the “D” isomeric form can be substituted for any L-amino acid residue, as long as the desired functional property is retained by the polypeptide. NH₂ refers to the free amino group present at the amino terminus of a polypeptide. COOH refers to the free carboxy group present at the carboxyl terminus of a polypeptide. In keeping with standard polypeptide nomenclature described in J Biol. Chem., 243:3557-59 (1968) and adopted at 37 C.F.R. §§ 1.821-1.822, abbreviations for amino acid residues are shown in the following Table:

Table of Correspondence

SYMBOL

| 1-Letter | 3-Letter | AMINO ACID |
|---|---|---|
| Y | Tyr | Tyrosine |
| G | Gly | Glycine |
| F | Phe | Phenylalanine |
| M | Met | Methionine |
| A | Ala | Alanine |
| S | Ser | Serine |
| I | Ile | Isoleucine |
| L | Leu | Leucine |
| T | Thr | Threonine |
| V | Val | Valine |
| P | Pro | Proline |
| K | Lys | Lysine |
| H | His | Histidine |
| Q | Gln | Glutamine |
| E | Glu | Glutamic acid |
| Z | Glx | Glutamic Acid and/or Glutamine |
| W | Trp | Tryptophan |
| R | Arg | Arginine |
| D | Asp | Aspartic acid |
| N | Asn | Asparagine |
| B | Asx | Aspartic Acid and/or Asparagine |
| C | Cys | Cysteine |
| X | Xaa | Unknown or other |

[0583] All sequences of amino acid residues represented herein by a formula have a left to right orientation in the conventional direction of amino-terminus to carboxyl-terminus. The phrase “amino acid residue” is defined to include the amino acids listed in the above Table of Correspondence, as well as modified, non-natural, and unusual amino acids. A dash at the beginning or end of an amino acid residue sequence indicates a peptide bond to a further sequence of one or more amino acid residues, or to an amino-terminal group such as NH₂, or to a carboxyl-terminal group such as COOH.

[0584] In a peptide or protein, suitable conservative substitutions of amino acids are known to those of skill in the art and generally can be made without altering a biological activity of a resulting molecule. Those of skill in the art recognize that, in general, single amino acid substitutions in non-essential regions of a polypeptide do not substantially alter biological activity (see, e.g., Watson et al., Molecular Biology of the Gene, 4th Edition, 1987, The Benjamin/Cummings Pub. Co., p. 224).

[0585] Such substitutions can be made in accordance with the exemplary substitutions set forth in the following Table:

### Exemplary Conservative Amino Acid Substitutions

| | Exemplary Conservative |
|---|---|
| Original Residue | Substitution(s) |
| Ala (A) | Gly; Ser |
| Arg (R) | Lys |
| Asn (N) | Gln; His |
| Cys (C) | Ser |
| Gln (Q) | Asn |
| Glu (E) | Asp |
| Gly (G) | Ala; Pro |
| His (H) | Asn; Gln |
| Ile (I) | Leu; Val |
| Leu (L) | Ile; Val |
| Lys (K) | Arg; Gln; Glu |
| Met (M) | Leu; Tyr; Ile |
| Phe (F) | Met; Leu; Tyr |
| Ser (S) | Thr |
| Thr (T) | Ser |
| Trp (W) | Tyr |
| Tyr (Y) | Trp; Phe |
| Val (V) | Ile; Leu |

[0587] Other substitutions also are permissible and can be determined empirically or in accord with other known conservative or non-conservative substitutions.

[0588] As used herein, “naturally occurring amino acids” refer to the 20 L-amino acids that occur in polypeptides.

[0589] As used herein, the term “non-natural amino acid” refers to an organic compound that has a structure similar to a natural amino acid, but that has been modified structurally to mimic the structure and reactivity of a natural amino acid. Non-naturally occurring amino acids thus include, for example, amino acids or analogs of amino acids other than the 20 naturally occurring amino acids and include, but are not limited to, the D-stereoisomers of amino acids. Exemplary non-natural amino acids are known to those of skill in the art, and include, but are not limited to, 2-Aminoadipic acid (Aad), 3-Aminoadipic acid (bAad), β-alanine/β-Amino-propionic acid (Bala), 2-Aminobutyric acid (Abu), 4-Aminobutyric acid/piperidinic acid (4Abu), 6-Aminocaproic acid (Acp), 2-Aminoheptanoic acid (Ahe), 2-Aminoisobutyric acid (Aib), 3-Aminoisobutyric acid (Baib), 2-Aminopimelic acid (Apm), 2,4-Diaminobutyric acid (Dbu), Desmosine (Des), 2,2′-Diaminopimelic acid (Dpm), 2,3-Diaminopropionic acid (Dpr), N-Ethylglycine (EtGly), N-Ethylasparagine (EtAsn), Hydroxylysine (Hyl), allo-Hydroxylysine (Ahyl), 3-Hydroxyproline (3Hyp), 4-Hydroxyproline (4Hyp), Isodesmosine (Ide), allo-Isoleucine (Aile), N-Methylglycine, sarcosine (MeGly), N-Methylisoleucine (MeIle), 6-N-Methyllysine (MeLys), N-Methylvaline (MeVal), Norvaline (Nva), Norleucine (Nle), and Ornithine (Orn).

[0590] As used herein, a DNA construct is a single-stranded or double-stranded, linear or circular DNA molecule that contains segments of DNA combined and juxtaposed in a manner not found in nature. DNA constructs exist as a result of human manipulation, and include clones and other copies of manipulated molecules.

[0591] As used herein, a DNA segment is a portion of a larger DNA molecule having specified attributes. For example, a DNA segment encoding a specified polypeptide is a portion of a longer DNA molecule, such as a plasmid or plasmid fragment, which, when read from the 5′ to 3′ direction, encodes the sequence of amino acids of the specified polypeptide.

[0592] As used herein, the term polynucleotide means a single- or double-stranded polymer of deoxyribonucleotides or ribonucleotide bases read from the 5′ to the 3′ end. Polynucleotides include RNA and DNA, and can be isolated from natural sources, synthesized in vitro, or prepared from a combination of natural and synthetic molecules. The length of a polynucleotide molecule is given herein in terms of nucleotides (abbreviated “nt”), or base pairs (abbreviated “bp”). The term nucleotides is used for single- and double-stranded molecules where the context permits. When the term is applied to double-stranded molecules, it is used to denote overall length and will be understood to be equivalent to the term base pairs. It will be recognized by those skilled in the art that the two strands of a double-stranded polynucleotide can differ slightly in length and that the ends thereof can be staggered; thus, all nucleotides within a double-stranded polynucleotide molecule cannot be paired. Such unpaired ends will, in general, not exceed 20 nucleotides in length.

[0593] As used herein, production by recombinant methods refers to the use of the well-known methods of molecular biology for expressing proteins encoded by cloned DNA.

[0594] As used herein, “heterologous nucleic acid” is nucleic acid that encodes products (i.e., RNA and/or proteins) that are not normally produced in vivo by the cell in which it is expressed, or nucleic acid that is in a locus in which it does not normally occur, or that mediates or encodes mediators that alter expression of endogenous nucleic acid, such as DNA, by affecting transcription, translation, or other regulatable biochemical processes. Heterologous nucleic acid, such as DNA, also is referred to as foreign nucleic acid. Any nucleic acid, such as DNA, that one of skill in the art would recognize or consider as heterologous or foreign to the cell in which it is expressed, is herein encompassed by heterologous nucleic acid; heterologous nucleic acid includes exogenously added nucleic acid that is also expressed endogenously. Heterologous nucleic acid is generally not endogenous to the cell into which it is introduced, but has been obtained from another cell, or prepared synthetically, or is introduced into a genomic locus in which it does not occur naturally, or its expression is under the control of regulatory sequences or a sequence that differs from the natural regulatory sequence or sequences.

[0595] Examples of heterologous nucleic acid herein include, but are not limited to, nucleic acid that encodes a protein in a DNA/RNA sensor pathway or a gain-of-function or constitutively active variant thereof, or an immunostimulatory protein, such as a cytokine, chemokine or co-stimulatory molecule, that confers or contributes to anti-tumor immunity in the tumor microenvironment. Other products, such as antibodies and fragments thereof, BiTEs®, decoy receptors, antagonizing polypeptides and RNAi, that confer or contribute to anti-tumor immunity in the tumor microenvironment, also are included. In the immunostimulatory bacteria, the heterologous nucleic acid generally is encoded on the introduced plasmid, but it can be introduced into the genome of the bacterium, such as a promoter that alters expression of a bacterial product. Heterologous nucleic acid, such as DNA, includes nucleic acid that can, in some manner, mediate expression of DNA that encodes a therapeutic product, or it can encode a product, such as a peptide or RNA, that in some manner mediates, directly or indirectly, expression of a therapeutic product.

[0596] As used herein, cell therapy involves the delivery of cells to a subject to treat a disease or condition. The cells, which can be allogeneic or autologous to the subject, are modified ex vivo, such as by infection of cells with immunostimulatory bacteria provided herein, so that they deliver or express products when introduced to a subject.

[0597] As used herein, genetic therapy involves the transfer of heterologous nucleic acid, such as DNA, into certain cells, such as target cells, of a mammal, particularly a human, with a disorder or condition for which such therapy is sought. The nucleic acid, such as DNA, is introduced into the selected target cells in a manner such that the heterologous nucleic acid, such as DNA, is expressed, and a therapeutic product(s) encoded thereby is (are) produced. Genetic therapy can also be used to deliver nucleic acid encoding a gene product that replaces a defective gene or supplements a gene product produced by the mammal or the cell in which it is introduced. The introduced nucleic acid can encode a therapeutic compound, such as a growth factor or inhibitor thereof, or a tumor necrosis factor or inhibitor thereof, such as a receptor thereof, that is not normally produced in the mammalian host or that is not produced in therapeutically effective amounts or at a therapeutically useful time. The heterologous nucleic acid, such as DNA, encoding the therapeutic product, can be modified prior to introduction into the cells of the afflicted host in order to enhance or otherwise alter the product or expression thereof. Genetic therapy can also involve delivery of an inhibitor or repressor or other modulator of gene expression.

[0598] As used herein, “expression” refers to the process by which polypeptides are produced by transcription and translation of polynucleotides. The level of expression of a polypeptide can be assessed using any method known in art, including, for example, methods of determining the amount of the polypeptide produced from the host cell. Such methods can include, but are not limited to, quantitation of the polypeptide in the cell lysate by ELISA, Coomassie blue staining following gel electrophoresis, Lowry protein assay, and Bradford protein assay.

[0599] As used herein, a “host cell” is a cell that is used to receive, maintain, reproduce and/or amplify a vector. A host cell also can be used to express the polypeptide encoded by the vector. The nucleic acid contained in the vector is replicated when the host cell divides, thereby amplifying the nucleic acid.

[0600] As used herein, a “vector” is a replicable nucleic acid from which one or more heterologous proteins can be expressed when the vector is transformed into an appropriate host cell. Reference to a vector includes those vectors into which a nucleic acid encoding a polypeptide or fragment thereof can be introduced, typically by restriction digest and ligation. Reference to a vector also includes those vectors that contain nucleic acid encoding a polypeptide, such as a modified anti-CTLA-4 antibody. The vector is used to introduce the nucleic acid encoding the polypeptide into the host cell for amplification of the nucleic acid, or for expression/display of the polypeptide encoded by the nucleic acid. The vectors typically remain episomal, but can be designed to effect integration of a gene or portion thereof into a chromosome of the genome. Also contemplated are vectors that are artificial chromosomes, such as yeast artificial chromosomes and mammalian artificial chromosomes. Selection and use of such vehicles are well-known to those of skill in the art. A vector also includes “virus vectors” or “viral vectors.” Viral vectors are engineered viruses that are operatively linked to exogenous genes to transfer (as vehicles or shuttles) the exogenous genes into cells.

[0601] As used herein, an “expression vector” includes vectors capable of expressing DNA that is operatively linked with regulatory sequences, such as promoter regions, that are capable of effecting expression of such DNA fragments. Such additional segments can include promoter and terminator sequences, and optionally can include one or more origins of replication, one or more selectable markers, an enhancer, a polyadenylation signal, and the like. Expression vectors are generally derived from plasmid or viral DNA, or can contain elements of both. Thus, an expression vector refers to a recombinant DNA or RNA construct, such as a plasmid, a phage, recombinant virus or other vector that, upon introduction into an appropriate host cell, results in expression of the cloned DNA. Appropriate expression vectors are well-known to those of skill in the art and include those that are replicable in eukaryotic cells and/or prokaryotic cells and those that remain episomal or those which integrate into the host cell genome.

[0602] As used herein, “primary sequence” refers to the sequence of amino acid residues in a polypeptide, or the sequence of nucleotides in a nucleic acid molecule.

[0603] As used herein, “sequence identity” refers to the number of identical or similar amino acids or nucleotide bases in a comparison between a test and a reference poly-peptide or polynucleotide. Sequence identity can be determined by sequence alignment of nucleic acid or protein sequences to identify regions of similarity or identity. For purposes herein, sequence identity is generally determined by alignment to identify identical residues. The alignment can be local or global. Matches, mismatches and gaps can be identified between compared sequences. Gaps are null amino acids or nucleotides inserted between the residues of aligned sequences so that identical or similar characters are aligned. Generally, there can be internal and terminal gaps. When using gap penalties, sequence identity can be determined with no penalty for end gaps (e.g., terminal gaps are not penalized). Alternatively, sequence identity can be determined without taking into account gaps, as the number of identical positions/length of the total aligned sequence×100.

[0604] As used herein, a “global alignment” is an alignment that aligns two sequences from beginning to end, aligning each letter in each sequence only once. An alignment is produced, regardless of whether or not there is similarity or identity between the sequences. For example, 50% sequence identity based on “global alignment” means that in an alignment of the full sequence of two compared sequences each of 100 nucleotides in length, 50% of the residues are the same. It is understood that global alignment also can be used in determining sequence identity even when the length of the aligned sequences is not the same. The differences in the terminal ends of the sequences will be taken into account in determining sequence identity, unless the “no penalty for end gaps” is selected. Generally, a global alignment is used on sequences that share significant similarity over most of their length. Exemplary algorithms for performing global alignment include the Needleman-Wunsch algorithm (Needleman et al. (1970) J. Mol. Biol. 48:443-453). Exemplary programs for performing global alignment are publicly available and include the Global Sequence Alignment Tool available at the National Center for Biotechnology Information (NCBI) website (ncbi.nlm.nih.gov/), and the program available at deepc2.psi.iastate.edu/aat/align/align.html.

[0605] As used herein, a “local alignment” is an alignment that aligns two sequences, but only aligns those portions of the sequences that share similarity or identity. Hence, a local alignment determines if sub-segments of one sequence are present in another sequence. If there is no similarity, no alignment will be returned. Local alignment algorithms include BLAST, or the Smith-Waterman algorithm (Adv. Appl. Math. 2:482 (1981)). For example, 50% sequence identity based on “local alignment” means that in an alignment of the full sequence of two compared sequences of any length, a region of similarity or identity of 100 nucleotides in length has 50% of the residues that are the same in the region of similarity or identity.

[0606] For purposes herein, sequence identity can be determined by standard alignment algorithm programs used with default gap penalties established by each supplier. Default parameters for the GAP program can include: (1) a unary comparison matrix (containing a value of 1 for identities and 0 for non-identities) and the weighted comparison matrix of Gribskov et al. (1986) Nucl. Acids Res. 14:6745-6763, as described by Schwartz and Dayhoff, eds., Atlas of Protein Sequence and Structure, National Biomedical Research Foundation, pp. 353-358 (1979); (2) a penalty of 3.0 for each gap and an additional 0.10 penalty for each symbol in each gap; and (3) no penalty for end gaps. Whether any two nucleic acid molecules have nucleotide sequences, or any two polypeptides have amino acid sequences that are at least 80%, 85%, 90%, 95%, 96%, 97%, 98%, or 99% “identical,” or other similar variations reciting a percent identity, can be determined using known computer algorithms based on local or global alignment (see, e.g., wikipedia.org/wiki/Sequence_alignment_software, providing links to dozens of known and publicly available alignment databases and programs). Generally, for purposes herein sequence identity is determined using computer algorithms based on global alignment, such as the Needleman-Wunsch Global Sequence Alignment tool available from NCBI/BLAST (blast.ncbi.nlm.nih.gov/Blast.cgi?CMD=Web&Page_TYPE=BlastHome); LAlign (William Pearson implementing the Huang and Miller algorithm (Adv. Appl. Math. (1991) 12:337-357)); and the program from Xiaoqui Huang available at deepc2.psi.iastate.edu/aat/align/align.html. Typically, the full-length sequence of each of the compared polypeptides or nucleotides is aligned across the full-length of each sequence in a global alignment. Local alignment also can be used when the sequences being compared are substantially the same length.

[0607] Therefore, as used herein, the term “identity” represents a comparison or alignment between a test and a reference polypeptide or polynucleotide. In one non-limiting example, “at least 90% identical to” refers to percent identities from 90% to 100% relative to the reference polypeptide or polynucleotide. Identity at a level of 90% or more is indicative of the fact that, assuming for exemplification purposes a test and reference polypeptide or polynucleotide length of 100 amino acids or nucleotides are compared, no more than 10% (i.e., 10 out of 100) of amino acids or nucleotides in the test polypeptide or polynucleotide differ from those of the reference polypeptide or polynucleotide. Similar comparisons can be made between a test and reference polynucleotide. Such differences can be represented as point mutations randomly distributed over the entire length of an amino acid sequence, or they can be clustered in one or more locations of varying length up to the maximum allowable, e.g., 10/100, amino acid differences (approximately 90% identity). Differences also can be due to deletions or truncations of amino acid residues. Differences are defined as nucleic acid or amino acid substitutions, insertions or deletions. Depending on the length of the compared sequences, at the level of homologies or identities above about 85-90%, the result can be independent of the program and gap parameters set; such high levels of identity can be assessed readily, often without relying on software.

[0608] As used herein, a “disease or disorder” refers to a pathological condition in an organism resulting from a cause or condition, including, but not limited to, infections, acquired conditions, and genetic conditions, and that is characterized by identifiable symptoms.

[0609] As used herein, “treating” a subject with a disease or condition means that the subject's symptoms are partially or totally alleviated, or remain static following treatment.

[0610] As used herein, “treatment” refers to any effects that ameliorate symptoms of a disease or disorder. Treatment encompasses prophylaxis, therapy and/or cure. Treatment also encompasses any pharmaceutical use of any immunostimulatory bacterium or composition provided herein.

[0611] As used herein, “prophylaxis” refers to prevention of a potential disease and/or a prevention of worsening of symptoms or of progression of a disease.

[0612] As used herein, “prevention” or prophylaxis, and grammatically equivalent forms thereof, refers to methods in which the risk or probability of developing a disease or condition is reduced and/or the severity or symptoms thereof is/are reduced.

[0613] As used herein, a “pharmaceutically effective agent” includes any therapeutic agent or bioactive agent, including, but not limited to, for example, anesthetics, vasoconstrictors, dispersing agents, and conventional therapeutic drugs, including small molecule drugs and therapeutic proteins.

[0614] As used herein, a “therapeutic effect” means an effect resulting from treatment of a subject that alters, typically improves or ameliorates, the symptoms of a disease or condition, or that cures a disease or condition.

[0615] As used herein, a “therapeutically effective amount” or a “therapeutically effective dose” refers to the quantity of an agent, compound, material, or composition containing a compound that is at least sufficient to produce a therapeutic effect following administration to a subject. Hence, it is the quantity necessary for preventing, curing, ameliorating, arresting, or partially arresting, a symptom of a disease or disorder.

[0616] As used herein, “therapeutic efficacy” refers to the ability of an agent, compound, material, or composition containing a compound to produce a therapeutic effect in a subject to whom the agent, compound, material, or composition containing a compound has been administered.

[0617] As used herein, a “prophylactically effective amount” or a “prophylactically effective dose” refers to the quantity of an agent, compound, material, or composition containing a compound, that when administered to a subject, will have the intended prophylactic effect, e.g., preventing or delaying the onset or reoccurrence, of disease or symptoms, reducing the likelihood of the onset or reoccurrence, of disease or symptoms, or reducing the incidence of viral infection. The full prophylactic effect does not necessarily occur by administration of one dose, and can occur only after administration of a series of doses. Thus, a prophylactically effective amount can be administered in one or more administrations.

[0618] As used herein, amelioration of the symptoms of a particular disease or disorder by a treatment, such as by administration of a pharmaceutical composition or other therapeutic, refers to any lessening, whether permanent or temporary, lasting or transient, of the symptoms, that can be attributed to or associated with administration of the composition or therapeutic.

[0619] As used herein, an “anti-cancer agent” or “an anti-cancer therapeutic” refers to any agent or therapeutic that is destructive or toxic, either directly or indirectly, to malignant cells and tissues. For example, anti-cancer agents include agents that kill cancer cells or otherwise inhibit or impair the growth of tumors or cancer cells. Exemplary anti-cancer agents are chemotherapeutic agents, and immunotherapeutic agents.

[0620] As used herein “therapeutic activity” refers to the in vivo activity of a therapeutic product, such as a polypeptide, a nucleic acid molecule, and other therapeutic molecules. Generally, the therapeutic activity is the activity that is associated with treatment of a disease or condition.

[0621] As used herein, the term “subject” refers to an animal, including a mammal, such as a human being.

[0622] As used herein, a “patient” refers to a human subject.

[0623] As used herein, “animal” includes any animal, such as, but not limited to, primates, including humans, gorillas and monkeys; rodents, such as mice and rats; fowl, such as chickens; ruminants, such as goats, cows, deer, and sheep; and pigs and other animals. Non-human animals exclude humans as the contemplated animal. The polypeptides provided herein are from any source, animal, plant, prokaryotic and fungal. Most polypeptides are of animal origin, including mammalian origin.

[0624] As used herein, a “composition” refers to any mixture. It can be a solution, suspension, liquid, powder, paste, aqueous, non-aqueous, or any combination thereof.

[0625] As used herein, a “combination” refers to any association between or among two or more items. The combination can be two or more separate items, such as two compositions or two collections, a mixture thereof, such as a single mixture of the two or more items, or any variation thereof. The elements of a combination are generally functionally associated or related.

[0626] As used herein, “combination therapy” refers to administration of two or more different therapeutics. The different therapeutic agents can be provided and administered separately, sequentially, intermittently, or can be provided in a single composition.

[0627] As used herein, a “kit” is a packaged combination that optionally includes other elements, such as additional reagents and instructions for use of the combination or elements thereof, for a purpose including, but not limited to, activation, administration, diagnosis, and assessment of a biological activity or property.

[0628] As used herein, a “unit dose form” refers to physically discrete units suitable for human and animal subjects and packaged individually, as is known in the art.

[0629] As used herein, a “single dosage formulation” refers to a formulation for direct administration.

[0630] As used herein, a “multi-dose formulation” refers to a formulation that contains multiple doses of a therapeutic agent and that can be directly administered to provide several single doses of the therapeutic agent. The doses can be administered over the course of minutes, hours, weeks, days, or months. Multi-dose formulations can allow dose adjustment, dose-pooling and/or dose-splitting. Because multi-dose formulations are used over time, they generally contain one or more preservatives to prevent microbial growth.

[0631] As used herein, an “article of manufacture” is a product that is made and sold. As used throughout this application, the term is intended to encompass any of the compositions provided herein contained in articles of packaging.

[0632] As used herein, a “fluid” refers to any composition that can flow. Fluids thus encompass compositions that are in the form of semi-solids, pastes, solutions, aqueous mixtures, gels, lotions, creams, and other such compositions.

[0633] As used herein, an isolated or purified polypeptide or protein (e.g., an isolated antibody or antigen-binding fragment thereof) or a biologically-active portion thereof (e.g., an isolated antigen-binding fragment), is substantially free of cellular material or other contaminating proteins from the cell or tissue from which the polypeptide or protein is derived, or substantially free from chemical precursors or other chemicals when chemically synthesized. Preparations can be determined to be substantially free if they appear free of readily detectable impurities as determined by standard methods of analysis, such as thin layer chromatography (TLC), gel electrophoresis and high performance liquid chromatography (HPLC), that are used by those of skill in the art to assess such purity, or are sufficiently pure such that further purification does not detectably alter the physical and chemical properties, such as enzymatic and biological activities, of the substance. Methods for purification of the compounds to produce substantially chemically pure compounds are known to those of skill in the art. A substantially chemically pure compound, however, can be a mixture of stereoisomers. In such instances, further purification might increase the specific activity of the compound. As used herein, a “cellular extract” or “lysate” refers to a preparation or fraction which is made from a lysed or disrupted cell.

[0634] As used herein, “persistent viral infections” are those in which the virus is not cleared, but remains in specific cells of infected individuals. Persistent infections involve stages of silent and productive infection without rapidly killing or even producing excessive damage of the host cells. There are three types of overlapping persistent virus-host interactions that may be defined as latent, chronic, and slow infections. Diseases caused by persistent viral infections include acquired immunodeficiency syndrome (AIDS), AIDS-related complexes, chronic hepatitis, subacute sclerosing panencephalitis (chronic measles encephalitis), chronic papovavirus encephalitis (progressive multifocal leukoencephalopathy), spongiform encephalopathies (caused by prions), several herpesvirus-induced diseases, and some neoplasias. Viruses that cause these and other infections include, for example, herpesviruses, varicella-zoster virus (VZV), measles virus, human T-cell leukemia viruses (HTLVs), human immunodeficiency virus (HIV), human papovaviruses, human parvoviruses, human papillomaviruses, hepatitis viruses, adenoviruses, and parvoviruses. As used herein, a “control” refers to a sample that is substantially identical to the test sample, except that it is not treated with a test parameter, or, if it is a plasma sample, it can be from a normal volunteer not affected with the condition of interest. A control also can be an internal control.

[0635] As used herein, the singular forms “a,” “an” and “the” include plural referents unless the context clearly dictates otherwise. Thus, for example, reference to a polypeptide, comprising “an immunoglobulin domain” includes polypeptides with one or a plurality of immunoglobulin domains.

[0636] As used herein, the term “or” is used to mean “and/or” unless explicitly indicated to refer to alternatives only or the alternatives are mutually exclusive.

[0637] As used herein, ranges and amounts can be expressed as “about” a particular value or range. “About” also includes the exact amount. Hence, “about 5 amino acids” means “about 5 amino acids” and also “5 amino acids.”

[0638] As used herein, “optional” or “optionally” means that the subsequently described event or circumstance does or does not occur, and that the description includes instances where said event or circumstance occurs and instances where it does not. For example, an optionally variant portion means that the portion is variant or non-variant.

[0639] As used herein, the abbreviations for any protective groups, amino acids and other compounds, are, unless indicated otherwise, in accord with their common usage, recognized abbreviations, or the IUPAC-IUB Commission on Biochemical Nomenclature (see, Biochem. (1972) 11(9):1726-1732).

[0640] For clarity of disclosure, and not by way of limitation, the detailed description is divided into the subsections that follow.

### B. Overview of Immunostimulatory Bacteria for Therapy

[0641] The recognition that bacteria have anti-cancer activity goes back to the 1800s, when several physicians observed the regression of tumors in patients infected with Streptococcus pyogenes. William Coley began the first study utilizing bacteria for the treatment of end-stage cancers, and developed a vaccine composed of S. pyogenes and Serratia marcescens, which was successfully used to treat a variety of cancers, including sarcomas, carcinomas, lymphomas and melanomas. Since then, a number of bacterial species, including Clostridium, Mycobacterium, Bifidobacterium, Listeria monocytogenes and Escherichia, have been studied as sources of anti-cancer vaccines (See, e.g., International PCT Application Publication Nos. WO 1999/013053 and WO 2001/025399; Bermudes et al. (2002) Curr. Opin. Drug Discov. Devel. 5:194-199; Patyar et al. (2010) Journal of Biomedical Science 17:21; and Pawlek et al. (2003) Lancet Oncol. 4:548-556).

[0642] As a therapeutic platform, bacteria have several advantages over other therapies such as oncolytic viruses. Some bacterial species can be engineered to be orally and systemically (intravenously; IV) administered, they propagate readily in vitro and in vivo, and they can be stored and transported in a lyophilized state. Bacterial chromosomes readily can be manipulated as they lack exons, and the complete genomes for numerous strains have been fully characterized (Felgner et al. (2016) mBio 7(5):e01220-16). Many types of bacteria are cheaper and easier to produce than viruses, and proper delivery of engineered bacteria can be favorable over viral delivery because they do not permanently integrate into host cell genomes, they preferentially infect myeloid cells over epithelial cells, and they can be rapidly eliminated by antibiotics if necessary, rendering them safe.

[0643] Provided herein are immunostimulatory bacteria that are modified to exploit these advantageous properties. The bacteria provided herein are modified so that they infect and accumulate in the tumor microenvironment, particularly in tumor-resident immune cells (myeloid cells), such as tumor-associated macrophages (TAMs), dendritic cells (DCs), and myeloid-derived suppressor cells (MDSCs), and also are designed to express and deliver high levels of therapeutic proteins and combinations, particularly complementary combinations, thereof. As described herein, the immunostimulatory bacteria provided herein can be used as vaccines to prevent and/or treat cancers and also as vaccines against pathogens, including bacterial, viral, parasitic, and other pathogens. These uses rely on the ability of the immunostimulatory bacteria provided herein to accumulate in tumor-resident macrophage, and also, when administered in directly, such as by intramuscular or inhalation, to accumulate in phagocytic cell, to promote durable immune responses and immunity. The properties of the bacteria that are for treatment of cancer also are advantageous for their use as vaccines. These properties derive from genome modifications that reduce TLR2 and TLR4 and 5 responses, and other modifications, such as auxotrophies that permit growth in vitro, but reduce or eliminate growth in vivo, and also auxotrophies that can reduce immunosuppressive effects of accumulated nutrients in the tumor microenvironment, such as adenosine, and those genome modifications that eliminate immunosuppressive effects of bacterial enzymes, such as asparaginase, which can inactivate T-cells.

[0644] The immunostimulatory bacteria provided herein have advantageous properties that are superior to existing bacterial therapies, and also cell therapies, oncolytic virus therapies, and prior bacterial therapies. The immunostimulatory bacteria provided herein, while they can be administered by any suitable route, are suitable for systemic, such as intravenous, administration. As shown and described herein, the immunostimulatory bacteria provided herein can target major immune pathways.

[0645] Provided are immunostimulatory bacteria that can be used or adapted as an anti-cancer therapeutics as well as an anti-cancer vaccines and pathogen vaccines, and also RNA delivery vehicles. The particular use can be selected based on the particular genome modifications and payloads. Provided are immunostimulatory bacteria that delivers a genetic payload encoding one or more therapeutic products, including, for example, a truncated co-stimulatory molecule (receptor or ligand; e.g., 4-1BBL, CD80/CD86, CD27L, B7RP1, OX40L) with a complete or partial cytoplasmic domain deletion, for expression on an antigen-presenting cell (APC), where the truncated gene product is capable of constitutive immunostimulatory signaling to a T-cell through co-stimulatory receptor engagement, and is unable to counter-regulatory signal to the APC, due to a deleted or truncated cytoplasmic domain. The immunostimulatory bacteria can encode a plurality of products including those that constitutively induce type I interferon (IFN) and those that stimulate anti-viral type of immune responses, such as IL-15, particularly IL-15 provided a IL-15/IL-15R alpha chain complex (IL-15 complex), and engineered STING proteins that constitutively induce type I IFN, and also can be modified to have reduced NF-κB signaling to eliminate or reduce undesirable inflammatory responses.

[0646] The immunostimulatory bacteria can encode and express one or more of IL-2, IL-7, IL-12p70 (IL-12p40+IL-12p35), IL-12, IL-15, IL-15/IL-15Rα chain complex, IL-18, IL-21, IL-23, IL-36γ, interferon-α, interferon-β, IL-2 that has attenuated binding to IL-2Ra, IL-2 that is modified so that it does not bind to IL-2Ra, CXCL9, CXCL10, CXCL11, CCL3, CCL4, CCL5, cytosolic DNA/RNA sensors or type I IFN pathway proteins, such as gain-of-function of constitutively active STING, IRF3, IRF7, MDA5, or RIG-I variants (that induce Type I IFN), inhibitors of TGF-beta, such as TGF-β inhibitory antibodies, TGF-beta polypeptide antagonists, and TGF-beta binding decoy receptors, antibodies and fragments thereof, such as those targeting immune checkpoints and other anti-cancer targets such as VEGF and IL-6, co-stimulatory receptors/molecules, such as 4-1BBL, including 4-1BBL with the cytoplasmic domain deleted or truncated or otherwise eliminated, and others. The immunostimulatory bacteria also can encode and express a truncated co-stimulatory molecule (e.g., 4-1BBL, CD80/CD86, CD27L, B7RP1, OX40L) with a complete or partial cytoplasmic domain deletion, for expression on an antigen-presenting cell (APC), where the truncated gene product is capable of constitutive immuno-stimulatory signaling to a T-cell through co-stimulatory receptor engagement, and is unable to counter-regulatory signal to the APC, due to a deleted or truncated cytoplasmic domain. Other encoded therapeutic products include those referred to as bispecific T-cell engagers (commercially available under the trademark BiTEs®), such as DLL3×CD3 engagers, exemplified herein.

[0647] Combinations of such therapeutic products and agents can be expressed in a single therapeutic composition. By virtue of the modifications of the bacterial genome, the immunostimulatory bacteria exhibit tumor-specific localization and enrichment, and provide intravenous (IV) administration for activation of anti-tumor immune pathways that are otherwise toxic if systemically activated.

[0648] The immunostimulatory bacteria provided herein are genetically designed to be safe and to target tumors, the tumor microenvironment, and/or tumor-resident immune cells, and also to target phagocytic cells when administered as vaccines, such as by direct administration. The immunostimulatory bacteria provided herein include a combination of genomic modifications and other modifications, as well as encoded therapeutic products, that function in concert to provide immunostimulatory bacteria that accumulate in tumor-resident immune cells, and that persist sufficiently long enough to deliver therapeutic products, particularly combinations that induce or promote anti-cancer immune stimulation in tumors and the tumor microenvironment, without toxic side-effects, or with limited toxic side-effects. When delivered systemically, such as intravenously (IV), the immunostimulatory bacteria enrich in tumors, including in metastatic lesions; they provide efficient genetic transfer of immune payloads, specifically to tumor-resident myeloid cells, including tumor-associated macrophages (TAMs), myeloid-derived suppressor cells (MDSCs), and dendritic cells (DCs); they induce powerful, local immune responses, destroying tumors and vaccinating against future recurrence; and, when therapy is finished, they are naturally eliminated, such as by phagocytosis and destruction by the infected cells, or they can be destroyed rapidly by a course of antibiotics.

[0649] The immunostimulatory bacteria provided herein exhibit preferential accumulation in the tumor microenvironment and/or in tumor-resident immune cells due to a designed purine/adenosine auxotrophy, and exhibit an inability to replicate inside of phagocytic cells. Immunostimulatory bacteria that avoid inactivation by serum complement allow for the delivery of a variety of immunotherapeutic agents and therapeutic products at high concentrations, directly within the tumor microenvironment, while minimizing toxicity to normal tissues, and are provided herein.

[0650] For example, as described in more detail, such as in section C.9., the immunostimulatory bacteria provided herein include one or more modifications of the genome that render them msbB⁻/pagP, which alters the lipid A in LPS, resulting in penta-acylation (wild-type lipid A has 6-7 fatty acid chains), reducing the TLR4 affinity; are adenosine/adenine auxotrophs, such as purI⁻; are asparaginase II⁻ (ansB⁻), which improves T-cell quality; are lacking in flagella (flagellin deficient); are deficient in genes/products that produce curli fimbriae, such as csgD⁻, which, among other properties, removes curli fimbriae; and include other optional genomic modifications, such as insertions, deletions, disruptions, and any other modification, so that the encoded product(s) is(are) not produced in active form, as discussed in detail herein. The immunostimulatory bacteria include a plasmid that encodes one or more therapeutic products, particularly anti-cancer products, under control of a eukaryotic promoter. These same modifications and properties render them useful as vaccines and as delivery vehicles for RNA, for use as cancer therapeutics and cancer vaccines, and pathogen vaccines, particularly when delivered by direct administration, such as by inhalation, and intramuscular (IM) injection, and other direct routes for delivery of payloads to phagocytic cells.

[0651] The immunostimulatory bacteria provided herein include genome modifications, such as deletions, disruptions, and other alterations that result in inactive encoded product(s), such as changing the orientation of all or part of the gene, so that functional gene product(s) is/are not expressed. Among the immunostimulatory bacteria provided are those that are modified so that the resulting bacteria are msbB⁻/purI⁻. In some embodiments, the bacteria are msbB⁻ and purI⁻, whereby the full length of at least the coding portion of the msbB and/or purI genes are/is deleted. The genome of the bacteria also can be modified so that the bacteria lack flagella. This is effected in bacteria that normally express flagella. In such bacteria, for example the fliC and fljB genes in Salmonella, or equivalent genes in other species to fliC and fljB, can be deleted or otherwise modified so that functional gene product is not expressed. The bacteria also can be modified so that they are adenosine auxotrophs, and/or are msbB⁻/pagP⁻. Also provided are immunostimulatory bacteria and pharmaceutical compositions containing them, where the bacteria do not express L-asparaginase II, whereby the bacteria are ansB⁻. Elimination of the encoded asparaginase activity improves or retains T-cell viability/activity. Therapeutic bacteria, such as inactivated or attenuated bacteria that are used as vaccines, can be improved by modifying the genome to eliminate asparaginase activity. Exemplary of such vaccines is the Bacillus Calmette-Guérin (BCG) vaccine and related vaccines, used to immunize against tuberculosis. The BCG vaccine is known to have variable effectiveness; eliminating the asparaginase can improve the effectiveness of such vaccine because the endogenous bacterial asparaginase inhibits or reduces T-cell activity.

[0652] The immunostimulatory bacteria provided herein, that deliver therapeutic products (such as constitutively active STING variants and other immunomodulatory proteins and products), to the tumor-resident myeloid cells promote adaptive immunity and enhance T-cell function. The immunostimulatory bacteria lead to a complete remodeling of the immunosuppressive tumor microenvironment, towards an adaptive anti-tumor phenotype, and away from a bacterial phenotype, which is characterized by the promotion of innate immunity and the suppression of adaptive immunity. As described herein, these properties and payloads also can be exploited for use of the bacteria as vaccines and RNA delivery platforms.

[0653] Immunostimulatory bacteria provided herein can exhibit significantly more, such as at least about 100,000-fold greater, tumor infiltration and enrichment, compared to unmodified bacteria, or compared to strain VNP20009. For example, the bacteria provided herein contain genome modifications whereby they infect macrophage in tumors (and other phagocytic cells when administered as vaccines) to deliver their payload, such as the combination of engineered STING (see discussion throughout regarding the various engineered STING proteins, such as the human STING with gain-of-function mutations, such as N154S/R284G, to render induction of type I IFN constitutive, and the CTT from a non-human STING that has lower NF-κB signaling activity, such as the CTT from Tasmanian devil, compared to human STING, and IL-15 in various forms, particularly IL-15/IL-15R alpha chain complex (IL-15 complex). It is shown herein that this combination has synergistic effects, and results in high degree of T-cell, including CD4+ and CD8+ cells, infiltration of tumors. This combination is comprehensive immunotherapy by virtue of acting at numerous therapeutic intervention points. The immunostimulatory bacteria are consumed by tumor-activated macrophages (TAMs) delivering the plasmid into the host cells, which express the encoded products, such as the IL-15 and engineered STING.

[0654] The immunostimulatory bacteria provided herein are consumed by tumor-resident immune cells, and deliver their contents, including the plasmid encoding the therapeutic products, which are expressed and produced in the immune cells and tumor microenvironment, to generate anti-tumor immunity. The bacteria that are asd⁻ and that do not include a complementing gene encoded on the plasmid for expression under host cell control, do not replicate in the host. Bacteria are provided that are thyA⁻, by virtue of genome modifications, such as deletion, insertion, transposition, or modification resulting in inactive or missing gen product, requiring thymine supplementation for growth, similarly deliver payloads into phagocytic cells, but cannot replicate in such cells.

[0655] 1. Bacterial Cancer Immunotherapy

[0656] Many solid tumor types have evolved a profoundly immunosuppressive microenvironment that renders them highly refractory to approved checkpoint therapies, such as anti-CTLA-4, anti-PD-1 and anti-PD-L1 therapies. One mechanism by which tumors have evolved resistance to checkpoint therapies is through their lack of intratumoral T-cells and tumor antigen cross-presenting dendritic cells (DCs), described as T-cell excluded, non-inflamed, or “cold tumors” (Sharma et al. (2017) Cell 168(4):707-723). For the small number of patients whose tumors are T-cell inflamed and respond to checkpoint immunotherapies, they often experience severe autoimmune toxicities, and many will eventually relapse and become checkpoint refractory (see, e.g., Buchbinder et al. (2015) J. Clin. Invest. 125:3377-3383; Hodi et al. (2010) N. Engl. J. Med. 363(8):711-723; and Chen et al. (2015) J. Clin. Invest. 125:3384-3391). Tumors initiate multiple mechanisms to evade immune surveillance, reprogram anti-tumor immune cells to suppress immunity, exclude and inactivate anti-tumor T-cells, and develop emerged resistance to the targeted cancer therapies (see, e.g., Mahoney et al. (2015) Nat. Rev. Drug Discov. 14(8):561-584). Solving this problem will require immunotherapies that can properly inflame these tumors, and generate anti-tumor immunity that can provide long-lasting tumor regressions. In addition, intratumoral therapies are intractable and will be quite limiting in a metastatic disease setting. Systemically-administered therapies that properly inflame each individual metastatic lesion and overcome multiple pathways of immunosuppression are required. By virtue of their ability to specifically target tumor-resident immune cells, and to express multiple complementary genetic payloads/therapeutic products, the immunostimulatory bacteria provided herein are designed to address these issues.

[0657] 2. Prior Therapies that Target the Tumor Microenvironment

[0658] A number of therapies that target the tumor microenvironment (TME) and attempt to promote anti-tumor immunity have been developed. Each has its own challenges and shortcomings, which are addressed by the immunostimulatory bacteria provided herein.

[0659] a. Limitations of Autologous T-Cell Therapies

[0660] Several systemically-administered therapeutic platforms have been investigated clinically, with the goal of accessing the highly immunosuppressive tumor microenvironment and inducing the proper immune responses to inflame tumors and promote anti-tumor immunity. These platforms include chimeric antigen receptors T-cells (CAR-T cells), which are produced by harvesting T-cells from patients and re-engineering them to fuse the T-cell receptor to an antibody Ig variable extracellular domain specific for a particular tumor antigen. This confers upon the cells the antigen-recognition properties of antibodies with the cytolytic properties of activated T-cells (see, e.g., Sadelain et al. (2015) J. Clin. Invest. 125(9):3392-3400). Despite the promise and potency of this technology, such as the FDA approvals of the CD19 CAR-Ts tisagenlecleucel (such as those under the trademark Kymriah®) and axicabtagene ciloleucel (under the trademark Yescarta®), success has been limited to CD19⁺ hematopoietic malignancies, and at the cost of deadly immune-related adverse events (see, e.g., Jackson et al. (2016) Nat. Rev. Clin. Oncol. 13(6):370-383). Tumors can mutate rapidly to downregulate the targeted tumor antigens for solid tumors, including the antigen CD19, thereby fostering immune escape (see, e.g., Mardiana et al. (2019) Sci. Transl. Med. 11(495):eaaw2293). There is not a plethora of tumor-specific target antigens. Solid tumor targets that are not expressed in healthy tissue are a major impediment to CAR-T therapy. Beyond that, CAR-T therapies suffer from other impediments to accessing solid tumor microenvironments, due to the lack of sufficient T-cell chemokine gradients, which are required for proper T-cell infiltration into tumors. In addition, once they have infiltrated tumors, they are rapidly inactivated (see, e.g., Brown et al. (2019) Nat. Rev. Immunol. 19(2):73-74). Should the safety of CAR-T cells be significantly improved and the efficacy expanded to solid tumors, the feasibility and costs associated with these labor-intensive therapies still limit their broader adoption.

[0661] b. Viral Vaccine Platforms

[0662] Oncolytic viruses (OVs) have natural and engineered properties to induce tumor cell lysis, recruit T-cells to the tumor, and deliver genetic material that can be read by tumor cells to produce immunomodulatory proteins. For example, the oncolytic virus designated Talimogene laherparepvec (T-VEC), is a modified herpes simplex virus encoding anti-melanoma antigens and the cytokine GM-CSF (granulocyte-macrophage colony-stimulating factor), that is intratumorally administered. It is FDA-approved for metastatic melanoma (see, e.g., Bastin et al. (2016) Biomedicines 4(3):21). T-VEC has demonstrated clinical benefit for some melanoma patients, and with fewer immune toxicities than the immune checkpoint antibodies or the FDA-approved systemic cytokines, such as IL-2 and interferon-alpha (see, e.g., Kim et al. (2006) Cytokine Growth Factor Rev. 17(5):349-366; and Paul et al. (2015) Gene 567(2):132-137).

[0663] Oncolytic viruses (OVs) possess a number of limitations as anti-cancer therapies. First, oncolytic viruses are rapidly inactivated by the human complement system in blood. It has proven difficult to deliver enough virus through systemic administration to have a desired therapeutic effect. Intratumoral delivery is limiting in a metastatic setting (where lesions are spread throughout the body), is intractable for most solid tumor types (e.g., lung and visceral lesions), and requires interventional, guided radiology for injection, which limits repeat dosing. Viruses can be difficult to manufacture at commercial scale and to store. Most OV-based vaccines, such as those based on paramyxovirus, reovirus and picornavirus, among others, have similar limitations (see, e.g., Chiocca et al. (2014) Cancer Immunol. Res. 2(4):295-300). Oncolytic viruses are inherently immunogenic and rapidly cleared from human blood, and T-cells that traffic into the tumor have a much higher affinity for viral antigens over weaker tumor neoantigens (see, e.g., Aleksic et al. (2012) Eur. J. Immunol. 42(12):3174-3179). Thus, in addition to the recognized technical limitations of the platform, OVs can have limited capacity to stimulate durable anti-tumor immunity (see, e.g., Kedl et al. (2003) Curr Opinion Immunol. 15:120-127; and Aleksic et al., (2012) Eur. J. Immunol. 42:3174-3179, which show that TCRs that bind viral antigens have higher HLA-A2 affinity that those that bind cancer related antigens).

[0664] c. Bacterial Cancer Therapies

[0665] A number of bacterial species have demonstrated preferential replication within solid tumors when injected from a distal site in preclinical animal studies. These include, but are not limited to, species of Salmonella, Bifidobacterium, Clostridium, and Escherichia. The tumor-homing properties of the bacteria, combined with the host's innate immune response to the bacterial infection, can mediate an anti-tumor response. This tumor tissue tropism reduces the size of tumors to varying degrees. One contributing factor to the tumor tropism of these bacterial species is the ability to replicate in anoxic and hypoxic environments. A number of these naturally tumor-tropic bacteria have been further engineered to increase the potency of the anti-tumor response (reviewed in Zu et al. (2014) Crit. Rev. Microbiol. 40(3):225-235; and Felgner et al. (2017) Microbial Biotechnology 10(5):1074-1078). Despite proof-of-concept in animal studies, complement factors in human serum, that are not present in animal models, can inactivate the bacteria, limiting their use as therapies to treat cancer.

[0666] To be administered orally or systemically, the bacterial strains are attenuated so that they do not cause systemic disease and/or septic shock, but still maintain some level of infectivity for effective tumor colonization, and resistance to inactivation by complement. A number of different bacterial species, including Clostridium (see, e.g., Dang et al. (2001) Proc. Natl. Acad. Sci. U.S.A. 98(26):15155-15160; U.S. Patent Publication Nos. 2017/0020931 and 2015/0147315; and U.S. Pat. Nos. 7,344,710 and 3,936,354), Mycobacterium (see, e.g., U.S. Patent Publication Nos. 2015/0224151 and 2015/0071873), Bifidobacterium (see, e.g., Dang et al. (2001); and Kimura et al. (1980) Cancer Res. 40:2061-2068), Lactobacillus (see, e.g., Dang et al. (2001)), Listeria monocytogenes (see, e.g., Le et al. (2012) Clin. Cancer Res. 18(3):858-868; Starks et al. (2004) J. Immunol. 173:420-427; and U.S. Patent Publication No. 2006/0051380) and Escherichia coli (see, e.g., U.S. Pat. No. 9,320,787), have been studied as possible agents for anti-cancer therapy.

[0667] The immunostimulatory bacteria provided herein include genome modifications that address problems with prior bacteria developed for treating tumors. Modifications generally include changes in the genome that render a gene or gene product inactive. This can be effected by deleting a gene or a portion thereof, or disrupting a gene, or any other such change that results in an inactive product. The genome modifications improve the targeting to or accumulation of bacteria in the tumor microenvironment, and in particular, are designed so that the bacteria preferentially or only infect tumor-resident immune cells and do not infect healthy tissues, thereby decreasing toxicity and improving delivery of encoded products. The immunostimulatory bacteria also are designed to deliver therapeutic products, including combinations thereof, designed to eliminate immune suppressive effects of tumors, enhance a host's anti-tumor response, and provide anti-tumor products.

[0668] i. Listeria

[0669] Listeria monocytogenes, a live attenuated intracellular bacterium capable of inducing potent CD8⁺ T-cell priming to expressed tumor antigens in mouse models of cancer, has also been explored as a bacterial cancer vector (see, e.g., Le et al. (2012) Clin. Cancer Res. 18(3):858-868). In a clinical trial of the L. monocytogenes-based vaccine incorporating the tumor antigen mesothelin, together with an allogeneic pancreatic cancer-based GVAX vaccine in a prime-boost approach, a median survival of 6.1 months was noted in patients with advanced pancreatic cancer, versus a median survival of 3.9 months for patients treated with the GVAX vaccine alone (see, e.g., Le et al. (2015) J. Clin. Oncol. 33(12):1325-1333). These results were not replicated in a larger phase 2b study, however, pointing to the difficulties in humans of subverting peripheral immune surveillance towards low affinity tumor neoantigens. L. monocytogenes also has shown limited immune responses to the encoded tumor antigens due to the requirement for bacteria to be lysed after phagocytosis, a pre-requisite to efficient plasmid transfer, which has not been demonstrated to occur by L. monocytogenes in human macrophages.

[0670] ii. Salmonella Species

[0671] Salmonella enterica serovar Typhimurium (S. typhimurium) is exemplary of a bacterial species for use as an anti-cancer therapeutic. S. typhimurium is a Gram-negative facultative anaerobe, which preferentially accumulates in hypoxic and necrotic areas due to the availability of nutrients from tissue necrosis, the leaky tumor vasculature, and their increased likelihood to survive in the immunosuppressed tumor microenvironment (see, e.g., Baban et al. (2010) Bioengineered Bugs 1(6):385-394). As a facultative anaerobe, S. typhimurium is able to grow under aerobic and anaerobic conditions, and is therefore able to colonize both small tumors that are less hypoxic, and large tumors that are more hypoxic.

[0672] S. typhimurium transmission through the fecal-oral route causes localized gastrointestinal infections. The bacterium can also enter the bloodstream and lymphatic system, infecting systemic tissues such as the liver, spleen and lungs. Systemic administration of wild-type S. typhimurium overstimulates TNF-α and IL-6, leading to a cytokine cascade and septic shock, which, if left untreated, can be fatal. As a result, pathogenic bacterial strains, such as S. typhimurium, must be attenuated to prevent systemic infection, without completely suppressing their ability to effectively colonize tumor tissues. Attenuation often is achieved by mutating a cellular structure that can elicit an immune response through pathogen pattern recognition, such as the bacterial outer membrane, or by limiting the bacterium's ability to replicate in the absence of supplemental nutrients.

[0673] S. typhimurium is an intracellular pathogen that is rapidly taken up by phagocytic myeloid cells such as macrophages, or it can directly invade non-phagocytic cells, such as epithelial cells, through its Salmonella pathogenicity island 1 (SPI-1)-encoded type III secretion system (T3SS1). Once inside cells, it can replicate within a Salmonella-containing vacuole (SCV) through SPI-2 regulation, and can also escape into the cytosol of some epithelial cells (see, e.g., Agbor et al. (2011) Cell Microbiol. 13(12):1858-1869; and Galan and Wolf-Watz (2006) Nature 444:567-573). Genetically modified bacterial strains of S. typhimurium have been described as anti-tumor agents to elicit direct tumoricidal effects and/or to deliver tumoricidal molecules (see, e.g., Clairmont et al. (2000) J. Infect. Dis. 181:1996-2002; Bermudes, D. et al. (2002) Curr. Opin. Drug Discov. Devel. 5:194-199; Zhao, M. et al. (2005) Proc. Natl. Acad. Sci. U.S.A. 102:755-760; and Zhao, M. et al. (2006) Cancer Res. 66:7647-7652).

[0674] Various methods for attenuation of bacterial pathogens are known in the art. Auxotrophic mutations, for example, render bacteria incapable of synthesizing an essential nutrient, and deletions/mutations in genes such as aro, pur, gua, thy, nad and asd (see, e.g., U.S. Patent Publication No. 2012/0009153) are used. Nutrients produced by the biosynthesis pathways involving these genes are often unavailable in host cells, and as such, bacterial survival is challenging. For example, attenuation of Salmonella and other species can be achieved by deletion or disruption of the aroA gene, which is part of the shikimate pathway, connecting glycolysis to aromatic amino acid biosynthesis (see, e.g., Felgner et al. (2016) mBio 7(5):e01220-16). Deletion or disruption of aroA results in bacterial auxotrophy for aromatic amino acids and subsequent attenuation (see, e.g., U.S. Patent Publication Nos. 2003/0170276, 2003/0175297, 2012/0009153, and 2016/0369282; and International Application Publication Nos. WO 2015/032165 and WO 2016/025582). Similarly, other enzymes involved in the biosynthesis pathway for aromatic amino acids, including aroC and aroD have been deleted to achieve attenuation (see, e.g., U.S. Patent Publication No. 2016/0369282; and International Application Publication No. WO 2016/025582). For example, S. typhimurium strain SL7207 is an aromatic amino acid auxotroph (aroA-mutant), and strains A1 and A1-R are leucine-arginine auxotrophs.

[0675] Mutations that attenuate bacteria also include, but are not limited to, mutations in genes that alter the biosynthesis of lipopolysaccharide (LPS), such as rfaL, rfaG, rfaH, rfaD, rfaP, rFb, rfa, msbB, htrB, firA, pagL, pagP, lpxR, arnT, eptA, and lpxT; mutations that introduce a suicide gene, such as sacB, nuk, hok, gef, kil, or phlA; mutations that introduce a bacterial lysis gene, such as hly and cly; mutations in genes that encode virulence factors, such as IsyA, pag, prg, iscA, virG, plc, and act; mutations in genes that modify the stress response, such as recA, htrA, htpR, hsp, and groEL; mutations in genes that disrupt the cell cycle, such as min; and mutations in genes that disrupt or inactivate regulatory functions, such as cya, crp, phoP/phoQ, and ompR (see, e.g., U.S. Patent Publication Nos. 2012/0009153, 2003/0170276, and 2007/0298012; U.S. Pat. No. 6,190,657; International Application Publication No. WO 2015/032165; Felgner et al. (2016) Gut Microbes 7(2):171-177; Broadway et al. (2014) J. Biotechnology 192:177-178; Frahm et al. (2015) mBio 6(2):e00254-15; Kong et al. (2011) Infection and Immunity 79(12):5027-5038; and Kong et al. (2012) Proc. Natl. Acad Sci. U.S.A. 109(47):19414-19419). In general, attenuating mutations are gene deletions to prevent spontaneous compensatory mutations that might result in reversion to a virulent phenotype.

[0676] Another way to attenuate S. typhimurium for safety is to use the PhoP/PhoQ operon system, which is a typical bacterial two-component regulatory system, composed of a membrane-associated sensor kinase (PhoQ), and a cytoplasmic transcriptional regulator (PhoP) (see, e.g., Miller, S. I. et al. (1989) Proc. Natl. Acad Sci. U.S.A. 86:5054-5058; and Groisman, E. A. et al. (1989) Proc. Natl. Acad Sci. U.S.A. 86:7077-7081). PhoP/PhoQ is required for virulence; its deletion results in poor survival of this bacterium in macrophages, and a marked attenuation in mice and humans (see, e.g., Miller, S. I. et al. (1989) Proc. Natl. Acad Sci. U.S.A. 86:5054-5058; Groisman, E. A. et al. (1989) Proc. Natl. Acad Sci. U.S.A. 86:7077-7081; Galan, J. E. and Curtiss, R. III. (1989) Microb. Pathog. 6:433-443; and Fields, P. I. et al. (1986) Proc. Natl. Acad Sci. U.S.A. 83:5189-5193). PhoP/PhoQ deletion strains have been employed as vaccine delivery vehicles (see, e.g., Galan, J. E. and Curtiss, R. III. (1989) Microb. Pathog. 6:433-443; Fields, P. I. et al. (1986) Proc. Natl. Acad. Sci. U.S.A. 83:5189-5193; and Angelakopoulos, H. and Hohmann, E. L. (2000) Infect. Immun. 68:2135-2141). As described herein, however, it is disadvantageous for a strain to have limited survival in macrophages if the bacteria are not attempting to transfer plasmids.

[0677] These attenuated bacterial strains have been found to be safe in mice, pigs, and monkeys when administered intravenously (IV) (see, e.g., Zhao, M. et al. (2005) Proc. Natl. Acad. Sci. U.S.A. 102:755-760; Zhao, M. et al. (2006) Cancer Res. 66:7647-7652; Tjuvajev J. et al. (2001) J. Control. Release 74:313-315; and Zheng, L. et al. (2000) Oncol. Res. 12:127-135), and certain live attenuated Salmonella strains have been shown to be well tolerated after oral administration in human clinical trials (see, e.g., Chatfield, S. N. et al. (1992) Biotechnology 10:888-892; DiPetrillo, M. D. et al. (1999) Vaccine 18:449-459; Hohmann, E. L. et al. (1996) J. Infect. Dis. 173:1408-1414; and Sirard, J. C. et al. (1999) Immunol. Rev. 171:5-26).

[0678] Other strains of S. typhimurium that have been attenuated for therapy are, for example, the leucine-arginine auxotroph A-1 (see, e.g., Zhao et al. (2005) Proc. Natl. Acad. Sci. U.S.A. 102(3):755-760; Yu et al. (2012) Scientific Reports 2:436; U.S. Pat. No. 8,822,194; and U.S. Patent Publication No. 2014/0178341) and its derivative AR-1 (see, e.g., Yu et al. (2012) Scientific Reports 2:436; Kawaguchi et al. (2017) Oncotarget 8(12):19065-19073; Zhao et al. (2006) Cancer Res. 66(15):7647-7652; Zhao et al. (2012) Cell Cycle 11(1):187-193; Tome et al. (2013) Anticancer Research 33:97-102; Murakami et al. (2017) Oncotarget 8(5):8035-8042; Liu et al. (2016) Oncotarget 7(16):22873-22882; and Binder et al. (2013) Cancer Immunol. Res. 1(2):123-133); the aroA⁻ mutant S. typhimurium strain SL7207 (see, e.g., Guo et al. (2011) Gene Therapy 18:95-105; and U.S. Patent Publication Nos. 2012/0009153, 2016/0369282 and 2016/0184456), and its obligate anaerobe derivative YB1 (see, e.g., International Application Publication No. WO 2015/032165; Yu et al. (2012) Scientific Reports 2:436; and Leschner et al. (2009) PLoS ONE 4(8):e6692); the aroA⁻/aroD⁻ mutant S. typhimurium strain BRD509, a derivative of the SL1344 (wild-type) strain (see, e.g., Yoon et al. (2017) Eur. J. Cancer 70:48-61); the asd⁻/cya⁻/crp⁻ mutant S. typhimurium strain χ4550 (see, e.g., Sorenson et al. (2010) Biologics: Targets & Therapy 4:61-73) and the phoP⁻/phoQ⁻ S. typhimurium strain LH430 (see, e.g., International Application Publication No. WO 2008/091375).

[0679] Attenuation, however, impacts the ability of the bacteria to accumulate in tumor-resident immune cells, the tumor microenvironment, and tumor cells. This problem is solved herein. The immunostimulatory bacteria, such as the Salmonella strains exemplified herein, are attenuated by virtue of modifications, that can include some of those described above, but also have other modifications and properties described herein that enhance the effectiveness as a cancer therapeutic.

[0680] Attenuated strains of S. typhimurium possess the innate ability to deliver DNA following phagocytosis and degradation (see, e.g., Weiss, S. (2003) Int. J. Med. Microbiol. 293(1):95-106). They have been used as vectors for gene therapy. For example, S. typhimurium strains have been used to deliver and express a variety of genes, including those that encode cytokines, angiogenesis inhibitors, toxins and prodrug-converting enzymes (see, e.g., U.S. Patent Publication No. 2007/0298012; Loeffler et al. (2008) Cancer Gene Ther. 15(12):787-794; Loeffler et al. (2007) Proc. Natl. Acad. Sci. U.S.A. 104(31):12879-12883; Loeffler et al. (2008) J. Natl. Cancer Inst. 100:1113-1116; Clairmont, C. et al. (2000) J. Infect. Dis. 181:1996-2002; Bermudes, D. et al. (2002) Curr. Opin. Drug Discov. Devel. 5:194-199; Zhao, M. et al. (2005) Proc. Natl. Acad. Sci. U.S.A. 102:755-760; Zhao, M. et al. (2006) Cancer Res. 66:7647-7652; and Tjuvajev J. et al. (2001) J. Control. Release 74:313-315).

[0681] S. typhimurium has been modified to deliver the tumor-associated antigen (TAA) survivin (SVN) to antigen presenting cells (APCs) to prime adaptive immunity (see, e.g., U.S. Patent Publication No. 2014/0186401; and Xu et al. (2014) Cancer Res. 74(21):6260-6270). SVN is an inhibitor of apoptosis protein (IAP), which prolongs cell survival and provides cell cycle control, and is overexpressed in all solid tumors and poorly expressed in normal tissues. This technology uses SPI-2 and its type III secretion system to deliver the TAAs into the cytosol of APCs, which then are activated to induce TAA-specific CD8⁺ T-cells and anti-tumor immunity (see, e.g., Xu et al. (2014) Cancer Res. 74(21):6260-6270). Similar to the Listeria-based TAA vaccines, this approach has shown promise in mouse models, but has not demonstrated effective tumor antigen-specific T-cell priming in humans.

[0682] In addition to the delivery of DNA that encodes proteins, S. typhimurium also has been used for the delivery of small interfering RNAs (siRNAs) and short hairpin RNAs (shRNAs) for cancer therapy. For example, attenuated S. typhimurium has been modified to express certain shRNAs, such as those that target the immunosuppressive gene indolamine dioxygenase (IDO). Silenced IDO expression in a murine melanoma model resulted in tumor cell death and significant tumor infiltration by neutrophils (see, e.g., Blache et al. (2012) Cancer Res. 72(24):6447-6456; International Application Publication No. WO 2008/091375; and U.S. Pat. No. 9,453,227). Co-administration of this vector with a hyaluronidase showed positive results in the treatment of murine pancreatic ductal adenocarcinoma (see, e.g., Manuel et al. (2015) Cancer Immunol. Res. 3(9):1096-1107; and U.S. Patent Publication No. 2016/0184456). In another study, an S. typhimurium strain attenuated by a phoP/phoQ deletion, and expressing a signal transducer and activator of transcription 3 (STAT3)-specific shRNA, inhibited tumor growth and reduced the number of metastatic organs, extending the life of C57BL/6 mice (see, e.g., Zhang et al. (2007) Cancer Res. 67(12):5859-5864). In another example, S. typhimurium strain SL7207 has been used for the delivery of shRNA targeting CTNNB1, the gene that encodes β-catenin (see, e.g., Guo et al. (2011) Gene Therapy 18:95-105; and U.S. Patent Publication Nos. 2009/0123426 and 2016/0369282). The S. typhimurium strain VNP20009 has been used for the delivery of shRNA targeting STAT3 (see, e.g., Manuel et al. (2011) Cancer Res. 71(12):4183-4191; U.S. Patent Publication Nos. 2009/0208534, 2014/0186401 and 2016/0184456; and International Application Publication Nos. WO 2008/091375 and WO 2012/149364). siRNAs targeting the autophagy genes Atg5 and Beclin1 have been delivered to tumor cells using S. typhimurium strains A1-R and VNP20009 (see, e.g., Liu et al. (2016) Oncotarget 7(16):22873-22882).

[0683] It has been found, however, that these strains do not effectively stimulate an anti-tumor immune response, nor effectively colonize tumors for delivery of therapeutic doses of encoded products. Improvement of such strains is needed so that they more effectively stimulate an anti-tumor immune response, such as the immunostimulatory bacteria provided herein. Further and alternative modifications of various bacteria have been described in published International PCT Application No. WO 2019/014398 and in U.S. Publication No. 2019/0017050 A1. The bacteria described in each of these publications, also described herein, can be modified as described herein to further improve their immunostimulatory and tumor-targeting properties.

[0684] iii. VNP20009 (YS1646)

[0685] Exemplary of a therapeutic bacterium that can be used as a starting strain for modification as described herein is the strain designated as VNP20009 (ATCC #202165, YS1646). This virus was a clinical candidate. VNP20009 (ATCC #202165, YS1646) was at least 50,000-fold attenuated for safety by deletion of the msbB and purI genes (see, e.g., Clairmont et al. (2000) J. Infect. Dis. 181:1996-2002; Low et al. (2003) Methods in Molecular Medicine, Vol. 90, Suicide Gene Therapy: Methods and Reviews, pp. 47-59; and Lee et al. (2000) International Journal of Toxicology 19:19-25). Deletion or disruption to prevent expression of the msbB gene alters the composition of the lipid A domain of lipopolysaccharide, the major component of Gram-negative bacterial outer membranes (see, e.g., Low et al. (1999) Nat. Biotechnol. 17(1):37-41). This prevents lipopolysaccharide-induced septic shock, attenuating the bacterial strain and lowering systemic toxicity, while reducing the potentially harmful production of TNFα (see, e.g., Dinarello, C. A. (1997) Chest 112(6 Suppl):321S-329S; and Low et al. (1999) Nat. Biotechnol. 17(1):37-41). Deletion or disruption to prevent expression of the purI gene renders the bacteria auxotrophic for purines, which further attenuates the bacteria and enriches them in the tumor microenvironment (see, e.g., Pawelek et al. (1997) Cancer Res. 57:4537-4544; and Broadway et al. (2014) J. Biotechnology 192:177-178). As shown herein, VNP20009 also is auxotrophic for the immunosuppressive nucleoside adenosine. Adenosine can accumulate to pathologically high levels in the tumor and contribute to an immunosuppressive tumor microenvironment (see, e.g., Peter Vaupel and Arnulf Mayer, Oxygen Transport to Tissue XXXVII, Advances in Experimental Medicine and Biology 876 chapter 22, pp. 177-183).

[0686] When VNP20009 was administered into mice bearing syngeneic or human xenograft tumors, the bacteria accumulated preferentially within the extracellular components of tumors at ratios exceeding 300-1000 to 1, and demonstrated tumor growth inhibition, as well as prolonged survival compared to control mice (see, e.g., Clairmont et al. (2000) J. Infect. Dis. 181:1996-2002). VNP20009 demonstrated success in tumor targeting and tumor growth suppression in animal models, while eliciting very little toxicity (see, e.g., Broadway et al. (2014) J. Biotechnology 192:177-178; Loeffler et al. (2007) Proc. Natl. Acad. Sci. U.S.A. 104(31):12879-12883; Luo et al. (2002) Oncology Research 12:501-508; and Clairmont et al. (2000) J. Infect. Dis. 181:1996-2002).

[0687] Results from the Phase 1 clinical trial in human metastatic melanoma revealed that, while VNP20009 was relatively safe and well tolerated, very limited anti-tumor activity was observed (see, e.g., Toso et al. (2002) J. Clin. Oncol. 20(1):142-152). While the use of VNP20009 resulted in no significant changes in metastatic disease burden, it did demonstrate evidence of tumor colonization at the maximum tolerated dose (MTD). Higher doses, which would be required to effect any anti-tumor activity, were not possible due to toxicity that correlated with high levels of pro-inflammatory cytokines.

[0688] The immunostimulatory bacteria provided herein provide numerous improvements and advantages that strain VNP20009 lacks. For exemplified strains the VNP20009 strain (YS1646) is used as the parental strain that is further modified by introduction of additional genome modifications, including those that eliminate flagella. The strain also is improved by completely deleting purI and/or msbB. Other genome modifications include elimination or inactivation of the curli fimbriae, and rendering the strain thyA⁻, so that the bacteria do not replicate in vivo, and/or ansB⁻ to eliminate asparaginase activity, which inactivates or reduces activity of T-cells. These genome modifications individually and together improve the ability of the bacteria to accumulate in or infect phagocytic cells, and also to increase a host's anti-viral type immune response. The immunostimulatory bacteria are modified to include various payloads that stimulate the immune system and/or reduce immunosuppression and provide therapeutic products and immunizing antigens and products.

[0689] The immunostimulatory bacteria deliver encoded genetic payloads in a tumor-specific manner, to tumor-resident myeloid cells. The immunostimulatory bacteria, by virtue of genomic modifications, such as deletions or disruptions of genes, and other modifications of the genome, exhibit reduced TLR2-, TLR4-, and TLR5-mediated inflammation, for example, by virtue of the elimination of the flagella, the modifications of the LPS, and the elimination of the curli fimbriae and reduced biofilm formation. As shown and described herein, elimination of TLR2, and also of TLR2/4/5-mediated activities and response promotes or enhances type I interferon production and/or reduces any reduction or inhibition of type I IFN that occurs when these receptors are activated or by virtue of TLR responses. The immunostimulatory bacteria enhance T-cell function and activities and effects, such as by virtue of the elimination of the expression of L-asparaginase II, and facilitate, provide, permit, and support plasmid maintenance. The bacteria accumulate in (or target) only, or substantially only, myeloid cells, particularly tumor-resident myeloid cells, providing highly efficient plasmid delivery after phagocytosis. The immunostimulatory bacteria provided herein colonize the tumor microenvironment, and can be administered systemically. The immunostimulatory bacteria provided herein exhibit at least 15-fold improved LD₅₀ compared to VNP20009. Thus, a much higher dose, if needed, of the immunostimulatory bacteria provided herein can be administered without toxic effects, compared to VNP20009 (see, e.g., the table below in the section F.5. describing exemplary dosages and administration).

[0690] It is shown and described herein that immunostimulatory bacteria modified as described herein, including elimination of flagella, LPS modifications, and other modifications, preferentially accumulate in or target myeloid cells, particularly tumor-resident myeloid cells. The Examples demonstrate that the immunostimulatory bacteria accumulate in such cells following systemic, such as intravenous, administration. The Examples also describe and show plasmid transfer from the immunostimulatory bacteria into tumor-resident myeloid cells, and durable protein expression following bacterial cell death, thereby delivering therapeutic products, including products that result in an anti-cancer response and phenotype.

[0691] iv. Wild-Type Strains

[0692] Accumulation of VNP20009 in tumors results from a combination of factors including: the inherent invasiveness of the parental strain, ATCC 14028, its ability to replicate in hypoxic environments, and its requirement for high concentrations of purines that are present in the interstitial fluid of tumors. As described herein, it is not necessary to use an attenuated strain, such as VNP20009, as a starting bacterial strain. By virtue of the modifications described herein, the bacteria are rendered non-toxic or attenuated. The parental strain, ATCC 14028, or another wild-type strain, can be used as a starting strain, and modified as described herein. As described herein, the immunostimulatory bacteria provided herein, by virtue of genome modifications, infiltrate and colonize tumors and tumor-resident immune cells, and also tumor-resident macrophages. When used as vaccines in subjects who do not have tumors, the bacteria accumulate in phagocytic cells, such as macrophages.

[0693] 3. Limitations of Existing Bacterial Cancer Immunotherapies

[0694] As shown herein, and also evidenced in light of the knowledge in the art, TLRs inhibit or prevent induction of type I IFN. The immunostimulatory bacteria provided herein, include modifications the reduce or inhibit or eliminate TLR2/4/5 responses/activities, thereby overcoming the inhibition of type I IFN. The immunostimulatory bacteria provided herein, also include properties and/or payloads that enhance type I IFN expression or render type I IFN induction constitutive.

[0695] In contrast, many classes of immunotherapies have significant limitations that limit their safety and efficacy, as well as complicated platforms that are not likely to be widely used. Bacteria, particularly those provided herein, have numerous advantageous properties for use as anti-cancer therapeutics, compared to, for example, oncolytic viruses. These include the ease with which they can be propagated, manufactured, stored, and eliminated from a host when treatment is completed. Viruses, however, also have advantageous properties, including the host response. The response to a bacterial infection is an innate inflammatory response, which is not advantageous for an anti-cancer therapeutic. The response to a viral infection is similar to an anti-cancer response. This is summarized in the following table.

| | Bacteria | Viruses |
|---|---|---|
| Innate Recognition by: | TLR2, TLR4 and TLR5 | TLR3, TLR7/8, RIG-I and |
| | | STING |
| Inflammatory | Promote innate immunity: | Promote innate immunity; |
| Cytokine Profile: | Suppress adaptive immunity | Promote adaptive immunity |
| Chemokine Gradients: | Attract neutrophils to | Attract T-cells, monocytes |
| | clear infection | to clear infection |
| Generation of | No | Yes |
| Immunity: | | |
| Immunogenicity: | Not immunogenic | Highly immunogenic |

[0696] A limitation of prior bacteria as a microbial anti-cancer platform, thus, derives from the specific immune program that is initiated upon sensing of bacteria, even intracellular bacteria, by the immune system, compared to viral-sensing pathways, which are more akin to anti-cancer pathways. The sensing programs that recognize viruses permit the generation of highly effective vaccines and durable adaptive immunity. Vaccinating against bacteria, however, has been met with limited success. For example, the FDA-approved vaccine for typhoid fever against Salmonella typhi is only 55% effective (see, e.g., Hart et al. (2016) PLoS ONE 11(1):e0145945), despite S. typhi containing a highly immunogenic Vi capsule and O:9 antigen, which do not occur in less immunogenic bacterial strains, such as L. monocytogenes and S. typhimurium, against which there are no vaccines.

[0697] Bacteria and viruses contain conserved structures known as Pathogen-Associated Molecular Patterns (PAMPs), which are sensed by host cell Pattern Recognition Receptors (PRRs). Recognition of PAMPs by PRRs triggers downstream signaling cascades that result in the induction of cytokines and chemokines, and initiation of a specific immune response (see, e.g., Iwasaki and Medzhitov (2010) Science 327(5963):291-295). The manner in which the innate immune system is engaged by PAMPs, and from what type of infectious agent, determines whether an appropriate innate or adaptive response is generated to combat the invading pathogen.

[0698] A class of PRRs, known as Toll Like Receptors (TLRs), recognize PAMPs derived from bacterial and viral origins, and are located in various compartments within the cell. TLRs recognize a variety of ligands, including lipopolysaccharide (TLR4), lipoproteins (TLR2), flagellin (TLR5), unmethylated CpG motifs in DNA (TLR9), double-stranded RNA (TLR3), and single-stranded RNA (TLR7 and TLR8) (see, e.g., Akira et al. (2001) Nat. Immunol. 2(8):675-680; and Kawai and Akira (2005) Curr. Opin. Immunol. 17(4):338-344). DNA and RNA-based viruses can be sensed either in host cytosolic compartments after phagocytosis, or directly in the cytosol. Type I interferons (IFN-α, IFN-β) are the signature cytokines induced by host recognition of single-stranded and double-stranded DNA and RNA, either of viral origin, or from the uptake of damaged host cell DNA. For example, the synthetic dsRNA analog polyinosinic:polycytidylic acid (poly(I:C)) is an agonist for endosomal TLR3; the more stable version, poly ICLC (such as that sold under the trademark Hiltonol®), of a dsRNA, has been in clinical development (see, e.g., Caskey et al. (2011) J. Exp. Med. 208(12):2357-2366). Similarly, single-stranded RNA (ssRNA) in the endosome is sensed by TLR7 and TLR8 (only in humans), and its known synthetic ligands, resiquimod and imiquimod, are FDA-approved topical cancer immunotherapies.

[0699] In the cytosol, double-stranded RNA (dsRNA) is sensed by RNA helicases such as retinoic acid-inducible gene I (RIG-I) and melanoma differentiation-associated gene 5 (MDA-5), leading to induction of type I IFN (see, e.g., Ireton and Gale (2011) Viruses 3(6):906-919). The cytosolic sensor for dsDNA is mediated through Stimulator of Interferon Genes (STING), an ER-resident adaptor protein that is the central mediator for sensing cytosolic dsDNA from infectious pathogens or aberrant host cell damage (see, e.g., Barber (2011) Immunol. Rev. 243(1):99-108). STING signaling activates the TANK binding kinase 1 (TBK1)/interferon regulatory factor 3 (IRF3) axis, and the NF-κB signaling axis, resulting in the induction of IFN-β and other pro-inflammatory cytokines and chemokines that strongly activate innate and adaptive immunity (see, e.g., Burdette et al. (2011) Nature 478(7370):515-518). Sensing of cytosolic dsDNA through STING requires cyclic GMP-AMP synthase (cGAS), a host cell nucleotidyl transferase that directly binds dsDNA, and in response, synthesizes a cyclic dinucleotide (CDN) second messenger, cyclic GMP-AMP (cGAMP), which binds and activates STING (see, e.g., Sun et al. (2013) Science 339(6121):786-791; and Wu et al. (2013) Science 339(6121):826-830).

[0700] STING also can bind to bacterially-derived CDNs, such as c-di-AMP produced from intracellular L. monocytogenes, or c-di-GMP from S. typhimurium. Cyclic GMP-AMP synthase (cGAS) produces a non-canonical CDN that can activate human STING alleles that are non-responsive to bacterially-derived canonical CDNs. Unlike the CDNs produced by bacteria, in which the two purine nucleosides are joined by a phosphate bridge with 3′-3′ linkages, the internucleotide phosphate bridge in the cGAMP synthesized by cGAS is joined by a non-canonical 2′-3′ linkage. These 2′-3′ molecules bind STING with 300-fold better affinity than bacterial 3′-3′ c-di-GMP, and thus, are more potent physiological ligands of STING (see, e.g., Civril et al. (2013) Nature 498(7454):332-337; Diner et al. (2013) Cell Rep. 3(5):1355-1361; Gao et al. (2013) Sci. Signal 6(269):pl1; and Ablasser et al. (2013) Nature 503(7477):530-534). The cGAS/STING signaling pathway in humans appears to have evolved to preferentially respond to viral pathogens over bacterial pathogens.

[0701] Thus, viral-sensing PRRs and TLRs, such as STING and RIG-I, induce type I IFN, and the cytokines and chemokines that lead to effective T-cell mediated adaptive immunity. In the tumor setting, type I IFN signaling is required to induce T-cell trafficking chemokines, such as CXCL10, and also to activate DC cross-presentation of tumor antigens to prime CD8⁺ T-cells (see, e.g., Diamond et al. (2011) J. Exp. Med. 208(10):1989-2003; and Fuertes et al. (2011) J. Exp. Med. 208(10):2005-2016).

[0702] In contrast, host surveillance of bacteria, such as S. typhimurium, is largely mediated through TLR2, TLR4, and TLR5 (see, e.g., Arpaia et al. (2011) Cell 144(5):675-688). These TLRs signal through MyD88 (myeloid differentiation primary response protein 88) and TRIF (Toll/interleukin-1 receptor (TIR)-domain-containing adapter-inducing interferon-β) adaptor molecules to mediate induction of the NF-κB-dependent pro-inflammatory cytokines TNF-α and IL-6 (see, e.g., Pandey et al. (2015) Cold Spring Harb. Perspect. Biol. 7(1):a016246). S. typhimurium was shown to activate the NLRP3 inflammasome pathway, resulting in the cleavage of caspase-1 and the induction of the pro-inflammatory cytokines IL-10 and IL-18 that lead to pyroptotic cell death. Engagement of TLR2, TLR4 and TLR5, and inflammasome activation, induces chemokines and cytokines that lead to bacterial clearance by neutrophils and macrophages. Evidence that S. typhimurium is cleared by T-cells is limited, and antibodies that are generated against it are non-neutralizing (see, e.g., McSorley (2014) Immunol. Rev. 260(1):168-182). Further, S. typhimurium has mechanisms to directly suppress T-cell function, impairing any potential anti-tumor T-cell response from being generated (see, e.g., Kullas et al. (2012) Cell Host Microbe 12(6)791-798). As a result, bacterial cancer therapies, such as S. typhimurium, lead to recruitment and clearance by neutrophils and macrophages, which are not the T-cells that are required to generate adaptive anti-tumor immunity. It is described and shown herein that these differences can explain why prior bacterial anti-cancer vaccines, even those harboring host tumor antigens, are poor T-cell priming vectors in humans. Many of the TLRs have been reported to induce type I interferon (IFN), but is found and described herein that this dogma is not necessarily correct with respect to TLR2/3/4/5/7 in primary human monocyte-derived macrophages. Experiments were performed using TLR agonists to assess the effects on type I IFN. The results showed that TLR3 and TLR4 agonists do not induce type I IFN in primary human monocytes unless pretreated with IFNα. Agonizing TLR2 does not induce type I IFN even with pretreatment with IFNα. In fact, TLR2 can inhibit induction of type I IFN. This is a heretofore unidentified problem with bacterial-based therapeutics.

[0703] These problems are among those addressed by the immunostimulatory bacteria provided herein. The immunostimulatory bacteria provided herein are engineered to have advantageous properties that were previously only provided by viral therapeutics, and also, to retain the advantageous properties of bacterial therapeutics. The immunostimulatory bacteria provided herein can be systemically administered, can localize to tumors, tumor-resident immune cells, and/or the tumor microenvironment, overcome immunosuppression, and properly activate anti-tumor immunity, while also limiting the autoimmune-related toxicities of existing systemic immunotherapies. The bacteria provided herein effectively localize to tumor-resident immune cells, and encode therapeutic anti-cancer products, and can encode a plurality of such products. For example, the bacteria provided herein can encode complementary therapeutic products. The immunostimulatory bacteria provided herein are modified to reduce or eliminate activation of TLR2, 4 and 5. As a result, they do not inhibit the induction of type I IFN. Such immunostimulatory bacteria provided herein encode payloads that induce type I IFN. This finding is generalized such that vaccines and delivery vehicles that are provided herein are designed so that TLR2 response is eliminated or reduced so that it does not prevent or inhibit type I IFN. In some embodiments, TLR4 and 5 responses are reduced or eliminated, thereby providing vaccines and other immune-stimulating therapeutics that do not inhibit type I IFN.

[0704] Provided herein is a superior microbial anti-cancer, vaccine, RNA delivery platform, engineered to retain the beneficial properties of bacteria, while eliciting a viral-like immune response that induces effective adaptive immunity. As described herein, bacteria, such as strains of Salmonella and other species, can be modified as described herein to have reduced inflammatory effects, and thus, to be less toxic. As a result, for example, higher dosages can be administered. Any of these strains of Salmonella, as well as other species of bacteria, known to those of skill in the art and/or listed above and herein, can be modified as described herein.

[0705] The immunostimulatory bacteria provided herein are modified to have increased colonization of the tumor microenvironment, tumor-resident immune cells, and tumors. They are engineered so that they have reduced toxicity, and other properties that target them to the tumor microenvironment, including adenosine auxotrophy. The strains provided herein also are engineered so that they are not inactivated by complement. These characteristics, particularly those that result in colonization/infection of phagocytic cells also render the bacteria useful as vaccine platforms and as RNA delivery vehicles. They can be adapted for each use by virtue of the payloads selected, the regulatory sequences employed, depending upon whether bacterial or host cell transcriptional/translational machinery is to be used for expression of encoded products, and the locus of the host cells or tissues in which the products are produced.

[0706] The bacterial strains provided herein are engineered to deliver therapeutic products. The bacterial strains herein deliver immunostimulatory proteins, including cytokines, chemokines and co-stimulatory molecules, as well as modified gain-of-function cytosolic DNA/RNA sensors that can constitutively evoke or induce type I IFN expression, and other therapeutic products, such as, but not limited to, antibodies and fragments thereof, TGF-β and IL-6 binding decoy receptors, TGF-β polypeptide antagonists, bispecific T-cell engagers (BiTEs®), RNAi, and complementary combinations thereof, that promote an anti-tumor immune response in the tumor microenvironment. The bacterial strains also include genomic modifications that reduce pyroptosis of phagocytic cells, thereby providing for a more robust immune response, and/or reduce or eliminate the ability to infect/invade epithelial cells, but retain the ability to infect/invade phagocytic cells, so that they accumulate more effectively in tumors, the tumor microenvironment and in tumor-resident immune cells. The bacterial strains also can be modified to be resistant to inactivation by complement factors in human serum. The bacterial strains also can be modified to encode therapeutic products, including, alone or in combinations, for example, cytokines, chemokines, co-stimulatory molecules, constitutively active inducers of type I IFN, and monoclonal antibodies (and fragments thereof) to immune checkpoints, and also to other such targets.

[0707] Provided is an anti-cancer therapeutic product that delivers a genetic payload encoding a truncated co-stimulatory molecule (receptor or ligand; e.g., 4-1BBL, CD80, CD86, CD27L, B7RP1, OX40L), with a full or partial cytoplasmic domain deletion, for expression on an antigen-presenting cell (APC), where the truncated gene product is capable of constitutive immuno-stimulatory signaling to a T-cell through co-stimulatory receptor engagement, and is unable to counter-regulatory signal to the APC due to a deleted or truncated cytoplasmic domain.

[0708] The bacteria also can encode antigens, such as tumor antigens, and pathogen antigens or proteins, in additional to (or in lieu of) the immunostimulatory protein(s), such as STING and cytokines.

### C. Modifications and Enhancements of Immunostimulatory Bacteria to Increase Therapeutic Index and to Increase Accumulation in Tumor-Resident Myeloid Cells

[0709] Provided herein are enhancements, including modifications to the bacterial genome, or to the immunostimulatory bacteria, that, for example, reduce toxicity and improve the anti-tumor activity, such as by increasing accumulation in tumor-resident myeloid cells, improving resistance to complement inactivation, reducing immune cell death, promoting adaptive immunity, and enhancing T-cell function. The modifications are described and exemplified with respect to Salmonella, particularly S. typhimurium; it is understood that the skilled person can effect similar enhancements/modifications in other bacterial species, such as Listeria, and Escherichia, and in other Salmonella strains to achieve similar properties and/or effects, and to express the same encoded payloads. Exemplary of such enhancements/modifications are the following:

[0710] 1. Deletions in Genes in the LPS Biosynthetic Pathway

[0711] The lipopolysaccharide (LPS) of Gram-negative bacteria is the major component of the outer leaflet of the bacterial membrane. It is composed of three major parts, lipid A, a non-repeating core oligosaccharide, and the O-antigen (or O polysaccharide). O-antigen is the outermost portion on LPS and serves as a protective layer against bacterial permeability, however, the sugar composition of O-antigen varies widely between strains. The lipid A and core oligosaccharide vary less, and are more typically conserved within strains of the same species. Lipid A is the portion of LPS that contains endotoxin activity. It is typically a disaccharide decorated with multiple fatty acids. These hydrophobic fatty acid chains anchor the LPS into the bacterial membrane, and the rest of the LPS projects from the cell surface. The lipid A domain is responsible for much of the toxicity of Gram-negative bacteria. Typically, LPS in the blood is recognized as a significant pathogen associated molecular pattern (PAMP), and induces a profound pro-inflammatory response. LPS is the ligand for a membrane-bound receptor complex comprising CD14, MD2, and TLR4. TLR4 is a transmembrane protein that can signal through the MyD88 and TRIF pathways to stimulate the NF-κB pathway and result in the production of pro-inflammatory cytokines, such as TNF-α and IL-6, the result of which can be endotoxic shock, which can be fatal. LPS in the cytosol of mammalian cells can bind directly to the caspase recruitment domains (CARDs) of caspases 4, 5, and 11, leading to autoactivation and pyroptotic cell death (see, e.g., Hagar et al. (2015) Cell Research 25:149-150). The composition of lipid A and the toxigenicity of lipid A variants is well documented. For example, a monophosphorylated lipid A is much less inflammatory than lipid A with multiple phosphate groups. The number and length of the acyl chains on lipid A also can have a profound impact on the degree of toxicity. Canonical lipid A from E. coli has six acyl chains, and this hexa-acylation is potently toxic. S. typhimurium lipid A is similar to that of E. coli; it is a glucosamine disaccharide that carries four primary and two secondary hydroxyacyl chains (see, e.g., Raetz et al. (2002) Annu. Rev. Biochem. 71:635-700).

[0712] a. msbB Deletion

[0713] The enzyme lipid A biosynthesis myristoyltransferase, encoded by the msbB gene in S. typhimurium, catalyzes the addition of a terminal myristoyl group to the lipid A domain of lipopolysaccharide (LPS) (see, e.g., Low et al. (1999) Nat. Biotechnol. 17(1):37-41). Deletion of msbB, thus, alters the acyl composition of the lipid A domain of LPS, the major component of the outer membranes of Gram-negative bacteria. For example, deletion of msbB in the S. typhimurium strain VNP20009 results in the production of a predominantly penta-acylated lipid A, which is less toxic than native hexa-acylated lipid A, and allows for systemic delivery without the induction of toxic shock (see, e.g., Lee et al. (2000) International Journal of Toxicology 19:19-25). This modification significantly reduces the ability of the LPS to induce septic shock, attenuating the bacterial strain, and thus, increasing the therapeutic index of Salmonella-based immunotherapeutics (see, e.g., U.S. Patent Publication Nos. 2003/0170276, 2003/0109026, 2004/0229338, 2005/0255088, and 2007/0298012). Importantly, msbB mutants that do not express the msbB product are unable to replicate intracellularly, as exemplified herein (see, e.g., Example 2), which is a requirement for Salmonella virulence (see, e.g., Leung et al. (1991) Proc. Natl. Acad. Sci. U.S.A. 88:11470-11474).

[0714] Other LPS mutations, including replacements, deletions, or insertions that alter LPS expression, can be introduced into the bacterial strains provided herein, including the Salmonella strains, that dramatically reduce virulence, and thereby provide for lower toxicity, and permit the administration of higher doses. As exemplified herein, the msbB⁻ locus can be partially deleted, or interrupted, or translocated. It also can be completely deleted, which can improve growth of the strain.

[0715] Corresponding genes, encoding homologs or orthologs of lipid A biosynthesis myristoyltransferase in other bacterial species, also can be deleted or disrupted to achieve similar results. These genes include, but are not limited to, for example, lpxM, encoding myristoyl-acyl carrier protein-dependent acyltransferase in E. coli; and msbB, encoding lipid A acyltransferase in S. typhi.

[0716] b. pagP Deletion or Inactivation

[0717] As described above, msbB mutants of S. typhimurium cannot undergo the terminal myristoylation of lipid A, and produce predominantly penta-acylated lipid A that is significantly less toxic than hexa-acylated lipid A. The modification of lipid A with palmitate is catalyzed by the enzyme lipid A palmitoyltransferase (PagP). Transcription of the pagP gene is under control of the PhoP/PhoQ system, which is activated by low concentrations of magnesium, e.g., inside the SCV. Thus, the acyl content of S. typhimurium lipid A is variable, and with wild-type bacteria, it can be hexa-acylated or penta-acylated. The ability of S. typhimurium to palmitate its lipid A increases resistance to antimicrobial peptides that are secreted into phagolysosomes.

[0718] In wild-type S. typhimurium, expression of pagP results in lipid A that is hepta-acylated. In an msbB mutant (in which the terminal acyl chain of the lipid A cannot be added), the induction of pagP results in a hexa-acylated lipid A (see, e.g., Kong et al. (2011) Infection and Immunity 79(12):5027-5038). Hexa-acylated lipid A has been shown to be the most pro-inflammatory. While groups have sought to exploit this pro-inflammatory signal, for example, by deletion or disruption of pagP to allow only hexa-acylated lipid A to be produced (see, e.g., Felgner et al. (2016) Gut Microbes 7(2):171-177; and Felgner et al. (2018) Oncoimmunology 7(2):e1382791), this can lead to poor tolerability, due to the TNF-α-mediated pro-inflammatory nature of the LPS, and paradoxically less adaptive immunity (see, e.g., Kocijancic et al. (2017) Oncotarget 8(30):49988-50001).

[0719] LPS is a potent TLR4 agonist that induces TNF-α and IL-6. The dose-limiting toxicities in the I.V. VNP20009 clinical trial (see, e.g., Toso et al. (2002) J. Clin. Oncol. 20(1):142-152) at 1E9 CFUs/m², were cytokine mediated (fever, hypotension), with TNF-α levels >100,000 pg/ml, and IL-6 levels >10,000 pg/ml in serum at 2 hours. Despite the msbB deletion in VNP20009 and its reduced pyrogenicity, the LPS still can be toxic at high doses, possibly due to the presence of hexa-acylated lipid A. Thus, a pagP⁻/msbB⁻ strain, which cannot produce hexa-acylated lipid A, and produces only penta-acylated lipid A, resulting in lower induction of pro-inflammatory cytokines, is better tolerated at higher doses, and will allow for dosing in humans at or above 1E9 CFUs/m². Higher dosing leads to increased colonization of tumors, tumor-resident immune cells, and the tumor microenvironment, enhancing the therapeutic efficacy of the immunostimulatory bacteria. Because of the resulting change in bacterial membranes and structure, the host immune response, such as complement activity, is altered so that the bacteria are not eliminated upon systemic administration. For example, it is shown herein that pagP⁻/msbB⁻ mutant strains have increased resistance to complement inactivation and enhanced stability in human serum.

[0720] Provided herein are immunostimulatory bacteria, exemplified by live attenuated Salmonella strains, such as the exemplary strain of S. typhimurium, that only can produce LPS with penta-acylated lipid A, that contain a deletion or disruption of the msbB gene, and that further are modified by deletion or disruption of pagP. As discussed above, deletion of msbB expression prevents the terminal myristoylation of lipid A, while deletion of pagP expression prevents palmitoylation. A strain modified to produce LPS penta-acylated lipid A results in lower levels of pro-inflammatory cytokines, improved stability in the blood, resistance to complement fixation, increased sensitivity to antimicrobial peptides, enhanced tolerability, and increased anti-tumor immunity when further modified to express heterologous genetic payloads that stimulate the immune response in the tumor microenvironment.

[0721] Corresponding genes, encoding homologs and orthologs of lipid A palmitoyltransferase (PagP) in other bacterial species, also can be deleted or disrupted to achieve similar results. These genes include, but are not limited to, for example, pagP, encoding Lipid IVA palmitoyltransferase in E. coli; and pagP, encoding antimicrobial peptide resistance and lipid A acylation protein in S. typhi.

[0722] 2. Nutrient Auxotrophy

[0723] The immunostimulatory bacteria provided herein can be attenuated by rendering them auxotrophic for one or more essential nutrients, such as purines (for example, adenine), nucleosides (for example, adenosine), amino acids (for example, aromatic amino acids, arginine, and leucine), adenosine triphosphate (ATP), or other nutrients as known and described in the art.

[0724] a. purI Deletion/Disruption

[0725] Phosphoribosylaminoimidazole synthetase, an enzyme encoded by the purI gene (synonymous with the purM gene), is involved in the biosynthesis pathway of purines. Disruption or deletion or inactivation of the purI gene, thus, renders the bacteria auxotrophic for purines. In addition to being attenuated, purI mutants are enriched in the tumor environment and have significant anti-tumor activity (see, e.g., Pawelek et al. (1997) Cancer Research 57:4537-4544). It was previously described that this colonization results from the high concentration of purines present in the interstitial fluid of tumors as a result of their rapid cellular turnover. Since the purI bacteria are unable to synthesize purines, they require an external source of adenine, and it was thought that this would lead to their restricted growth in the purine-enriched tumor microenvironment (see, e.g., Rosenberg et al. (2002) J Immunotherapy 25(3):218-225). While the VNP20009 strain was initially reported to contain a deletion of the purI gene (see, e.g., Low et al. (2003) Methods in Molecular Medicine Vol. 90, Suicide Gene Therapy: Methods and Reviews, pp. 47-59), subsequent analysis of the entire genome of VNP20009 demonstrated that the purI gene is not deleted, but is disrupted by a chromosomal inversion (see, e.g., Broadway et al. (2014) Journal of Biotechnology 192:177-178). The entire gene is contained within two parts of the VNP20009 chromosome that is flanked by insertion sequences, one of which has an active transposase. While disruption of the purI gene limits replication to the tumor tissue/microenvironment, it still permits intracellular replication and virulence. Deletion or disruption of each of the msbB and the purI genes, as exemplified herein (see, Example 2), is required to limit bacterial growth to the extracellular space in tumor tissue, and prevent intracellular replication. Provided herein are strains in which the coding portion of these genes are completely deleted to eliminate any possible reversion to wild-type by recombination. It is shown herein that such bacteria grow more effectively.

[0726] Besides purI gene deletions or disruptions, nutrient auxotrophy can be introduced into the immunostimulatory bacteria by deletions/mutations in genes such as aro, gua, thy, nad, and asd, for example. Nutrients produced by the biosynthesis pathways involving these genes are often unavailable in host cells, and as such, bacterial survival is challenging. For example, attenuation of Salmonella and other bacterial species can be achieved by deletion of the aroA gene, which is part of the shikimate pathway, connecting glycolysis to aromatic amino acid biosynthesis (see, e.g., Felgner et al. (2016) mBio 7(5):e01220-16). Deletion of aroA results in bacterial auxotrophy for aromatic amino acids and subsequent attenuation (see, e.g., U.S. Patent Publication Nos. 2003/0170276, 2003/0175297, 2012/0009153, and 2016/0369282; and International Application Publication Nos. WO 2015/032165 and WO 2016/025582). Similarly, other enzymes involved in the biosynthesis pathway for aromatic amino acids, including aroC and aroD, have been deleted to achieve attenuation (see, e.g., U.S. Patent Publication No. 2016/0369282; and International Application Publication No. WO 2016/025582). For example, S. typhimurium strain SL7207 is an aromatic amino acid auxotroph (aroA-⁻ mutant); strains A1 and A1-R are leucine-arginine auxotrophs; and VNP20009/YS1646 is a purine auxotroph (purI mutant) as well as being msbB⁻. As shown herein, VNP20009/YS1646 is also auxotrophic for the immunosuppressive nucleoside adenosine, and for ATP (see, e.g., Example 1). Strains provided herein include strains derived from the strain designated YS1646, such as those that lack flagella, are pagP⁻ or modified to produce penta-acylated LPS, and include additional modifications, including complete deletion of purI and/msbB, as well as deletion of the curli fimbriae, such as by genome modifications that render the bacterium csgD⁻, and additional modifications that require various nutrients for growth, such as thyA⁻ strains. The strains also can be have genome modifications that render them ansB⁻ so that they do not produce asparagine synthase, which can inhibit T cells, thereby eliminating this immunosuppressive aspect of immunostimulatory bacteria. Exemplary strains include those designated YS1646Δasd/ΔFLG/ΔpagP ΔansB ΔcsgD/F-ΔpurI, and YS1646Δasd/ΔFLG/pagP/ΔansB/ΔcsgD/F-ΔpurI/ΔthyA. It is understood that these designations reference Salmonella genes; similar modifications can be effected in other bacterial species, such as Listeria, and E. coli, such as Nissle.

[0727] Corresponding genes, encoding homologs or orthologs of phosphoribosylaminoimidazole synthetase (Purl), and other genes required for purine synthesis in other bacterial species, also can be deleted or disrupted to achieve similar results. These genes include, but are not limited to, for example, purM, encoding phosphoribosylformylglycinamide cyclo-ligase in E. coli; purM, encoding phosphoribosylformylglycinamidine cyclo-ligase in S. typhi; purA, encoding adenylosuccinate synthetase, purQ, encoding phosphoribosylformylglycinamidine synthase II, and purS, encoding phosphoribosylformylglycinamidine synthase subunit PurS in L. monocytogenes; purM (BL1122), encoding phosphoribosylformylglycinamidine cyclo-ligase in Bifidobacterium longum; and NT01CX_RS09765, encoding AIR synthase, and NT01CX_RS07625 (purM), encoding phosphoribosylformylglycinamidine cyclo-ligase in Clostridium novyi.

[0728] b. Adenosine Auxotrophy

[0729] Metabolites derived from the tryptophan and adenosine triphosphate (ATP)/adenosine pathways are major drivers in forming an immunosuppressive environment within the tumor/tumor microenvironment (TME). Adenosine, which exists in the free form inside and outside of cells, is an effector of immune function. Adenosine decreases T-cell receptor induced activation of NF-κB, and inhibits IL-2, IL-4, and IFN-γ. Adenosine decreases T-cell cytotoxicity, increases T-cell anergy, and increases T-cell differentiation to FOXP3⁺ or LAG3⁺ regulatory T-cells (T-reg cells, T-regs or Tregs). On natural killer (NK) cells, adenosine decreases IFN-7 production, and suppresses NK cell cytotoxicity. Adenosine blocks neutrophil adhesion and extravasation, decreases phagocytosis, and attenuates levels of superoxide and nitric oxide. Adenosine also decreases the expression of TNF-α, IL-12, and MIP-1α (CCL3) on macrophages, attenuates major histocompatibility complex (MHC) Class II expression, and increases levels of IL-10 and IL-6. Adenosine immunomodulation activity occurs after its release into the extracellular space of the tumor and activation of adenosine receptors (ADRs) on the surface of target immune cells, cancer cells or endothelial cells. The high adenosine levels in the tumor microenvironment result in local immunosuppression, which limits the capacity of the immune system to eliminate cancer cells.

[0730] Extracellular adenosine is produced by the sequential activities of membrane associated ectoenzymes, CD39 (ecto-nucleoside triphosphate diphosphohydrolase1, or E-NTPDase1) and CD73 (ecto-5′-nucleotidase), which are expressed on tumor stromal cells, together producing adenosine by phosphohydrolysis of ATP or ADP produced from dead or dying cells. CD39 converts extracellular ATP (or ADP) to 5′-AMP, which is converted to adenosine by CD73. Expression of CD39 and CD73 on endothelial cells is increased under the hypoxic conditions of the tumor microenvironment, thereby increasing levels of adenosine. Tumor hypoxia can result from inadequate blood supply and disorganized tumor vasculature, impairing delivery of oxygen (see, e.g., Carroll and Ashcroft (2005) Expert. Rev. Mol. Med. 7(6), DOI: 10.1017/51462399405009117). Hypoxia, which occurs in the tumor microenvironment, also inhibits adenylate kinase (AK), which converts adenosine to AMP, leading to very high extracellular adenosine concentrations. The extracellular concentration of adenosine in the hypoxic tumor microenvironment has been measured at 10-100 μM, which is up to about 100-1000 fold higher than the typical extracellular adenosine concentration of approximately 0.1 μM (see, e.g., Vaupel et al. (2016) Adv. Exp. Med. Biol. 876:177-183; and Antonioli et al. (2013) Nat. Rev. Can. 13:842-857). Since hypoxic regions in tumors are distal from microvessels, the local concentration of adenosine in some regions of the tumor can be higher than in others.

[0731] To direct effects to inhibit the immune system, adenosine also can control cancer cell growth and dissemination by effects on cancer cell proliferation, apoptosis and angiogenesis. For example, adenosine can promote angiogenesis, primarily through the stimulation of A_{2A} and A_{2B} receptors. Stimulation of the receptors on endothelial cells can regulate the expression of intercellular adhesion molecule 1 (ICAM-1) and E-selectin on endothelial cells, maintain vascular integrity, and promote vessel growth (see, e.g., Antonioli et al. (2013) Nat. Rev. Can. 13:842-857). Activation of one or more of A_{2A}, A_{2B}, or A₃ on various cells by adenosine can stimulate the production of the pro-angiogenic factors, such as vascular endothelial growth factor (VEGF), interleukin-8 (IL-8) or angiopoietin 2 (see, e.g., Antonioli et al. (2013) Nat. Rev. Can. 13:842-857).

[0732] Adenosine also can directly regulate tumor cell proliferation, apoptosis, and metastasis through interaction with receptors on cancer cells. For example, studies have shown that the activation of A₁ and A_{2A} receptors promote tumor cell proliferation in some breast cancer cell lines, and activation of A_{2B} receptors have cancer growth-promoting properties in colon carcinoma cells (see, e.g., Antonioli et al. (2013) Nat. Rev. Can. 13:842-857). Adenosine also can trigger apoptosis of cancer cells, and various studies have correlated this activity to activation of the extrinsic apoptotic pathway through A₃, or the intrinsic apoptotic pathway through A_{2A} and A_{2B} (see, e.g., Antonioli et al. (2013)). Adenosine can promote tumor cell migration and metastasis, by increasing cell motility, adhesion to the extracellular matrix, and expression of cell attachment proteins and receptors to promote cell movement and motility.

[0733] The extracellular release of adenosine triphosphate (ATP) occurs from stimulated immune cells, and from damaged, dying, or stressed cells. The NLR family pyrin domain-containing 3 (NLRP3) inflammasome, when stimulated by this extracellular release of ATP, activates caspase-1 and results in the secretion of the cytokines IL-10 and IL-18, which in turn activate innate and adaptive immune responses (see, e.g., Stagg and Smyth (2010) Oncogene 29:5346-5358). ATP can accumulate to concentrations exceeding 100 mM in tumor tissue, whereas levels of ATP found in healthy tissues are very low (˜1-5 μM) (see, e.g., Song et al. (2016) Am. J. Physiol. Cell Physiol. 310(2):C99-C114). ATP is catabolized into adenosine by the enzymes CD39 and CD73. Activated adenosine acts as a highly immunosuppressive metabolite via a negative-feedback mechanism and has a pleiotropic effect against multiple immune cell types in the hypoxic tumor microenvironment (see, e.g., Stagg and Smyth (2010) Oncogene 29:5346-5358). Adenosine receptors A_{2A} and A_{2B} are expressed on a variety of immune cells and are stimulated by adenosine to promote cAMP-mediated signaling changes, resulting in immunosuppressive phenotypes of T-cells, B-cells, NK cells, dendritic cells (DCs), mast cells, macrophages, neutrophils, and natural killer T (NKT) cells. As a result, adenosine levels can accumulate to over one hundred times their normal concentration in pathological tissues, such as solid tumors, which have been shown to overexpress ecto-nucleotidases, such as CD73. Adenosine also has been shown to promote tumor angiogenesis and development. An engineered bacterium that is auxotrophic for adenosine would thus exhibit enhanced tumor-targeting and colonization.

[0734] Immunostimulatory bacteria, such as Salmonella typhi, can be made auxotrophic for adenosine, for example, by deletion of the tsx gene (see, e.g., Bucarey et al. (2005) Infection and Immunity 73(10):6210-6219) or by deletion of purD (see, e.g., Husseiny (2005) Infection and Immunity 73(3):1598-1605). In the Gram-negative bacteria Xanthomonas oryzae, a purD gene knockout was shown to be auxotrophic for adenosine (see, e.g., Park et al. (2007) FEMS Microbiol. Lett. 276:55-59). As exemplified herein, S. typhimurium strain VNP20009 is auxotrophic for adenosine due to its purI modification; hence, further modification to render it auxotrophic for adenosine is not required. Hence, embodiments of the immunostimulatory bacterial strains, as provided herein, are auxotrophic for adenosine. Such auxotrophic bacteria selectively replicate in the tumor microenvironment, further increasing accumulation and replication of the administered bacteria in tumors, and decreasing the levels of adenosine in and around tumors, thereby reducing or eliminating the immunosuppression caused by the accumulation of adenosine. Exemplary of such bacteria, provided herein, is a modified strain of S. typhimurium containing purI msbB⁻ mutations to provide adenosine auxotrophy. For other strains and bacteria, the purI gene can be disrupted as it has been in VNP20009, or it can contain a deletion of all or a portion of the purI gene, which ensures that there cannot be a reversion to a wild-type gene. As described elsewhere herein, in strain VNP20009, the purI gene was inactivated by inversion. Similarly, the msbB gene in VNP20009 was not completely deleted. As exemplified herein, strains in which the purI and msbB genes have been completely deleted to eliminate any risk of reversion, demonstrate superior fitness as assessed by growth of cultures in vitro.

[0735] Immunostimulatory bacteria modified by rendering them auxotrophic for one or more essential nutrients, such as purines (for example, adenine), nucleosides (for example, adenosine), amino acids (for example, aromatic amino acids, arginine, and leucine), or adenosine triphosphate (ATP), are employed. In particular, in embodiments of the immunostimulatory bacteria provided herein, such as strains of S. typhimurium, the bacteria are rendered auxotrophic for adenosine, and optionally, for ATP, and preferentially accumulate in tumor microenvironments (TMEs). Hence, strains of immunostimulatory bacteria described herein are attenuated because they require purines, adenosine, and/or ATP for growth, and they preferentially colonize TMEs, which, as discussed below, have an abundance of these metabolites. Because adenosine accumulation that occurs in the tumor microenvironment of some tumors is immunosuppressive, adenosine auxotrophy eliminates the immunosuppression from adenosine that accumulates in the tumor microenvironment.

[0736] c. Thymidine Auxotrophy

[0737] Genome modifications can be introduced in place of or in addition to the inactivation/deletion (see section 3) discussed below. Other deletions or inactivation of genes or gene products required for growth, such as genes that produce nutrients, can be used in place of or in addition to, for example, the asd inactivation/deletion. These include, for example, modifications that render the bacteria thyA⁻ (see, e.g., Loessner et al. (2006) FEBS Lett 265:81-88). Immunostimulatory bacteria that are thyA⁻ have genome modifications, such as insertions, deletions, replacements, transpositions, and/or other changes, that result in inactive or eliminate production of thymidylate synthase. Thymidylate synthase catalyzes the reductive methylation of dUMP to dTMP, a DNA biosynthesis precursor (precursor to dTTP).

[0738] Elimination of expression or production or other attenuating mutations of the bacterial genome for production of such products results in release of encoded macromolecules upon bacterial cell death in vivo after administration. Asd, as discussed below, is an essential enzyme for bacterial cell wall synthesis; ThyA is an enzyme needed for DNA synthesis. Mutation of the respective genes renders the strain auxotrophic for diaminopimelic acid (DAP) or thymidine monophosphate precursors. Upon deprivation of the complementing substrates, such bacteria die by DAP-less or thymine-less death, resulting in release of bacterial proteins and plasmid. Inactivation or elimination of Asd, results in release of macromolecules. Elimination or inactivation of ThyA (to produce ΔthyA bacteria, which includes those with insertions, deletions, and other modifications so that active enzyme is not produced) expression/activity does not result in release of macromolecules, including proteins and plasmid, upon thymidine starvation (Loessner et al., (2006) FEBS Lett 265:81-88).

[0739] Thus, ΔthyA bacteria, in which the genome is modified so that active enzyme is not produced, are advantageous, for example, for in vivo delivery of plasmids to host cells, since the bacteria do not prematurely release their contents. Since the bacteria provided herein infect or accumulate in myeloid cells, such as phagocytic cells, such as macrophages, dendritic cells, monocytes, and neutrophils, which consume bacteria, the intact ΔthyA bacteria, release the plasmid encoding the payloads, such as therapeutic products, inside the targeted cells for, for example, expression, if RNA, or secretion or presentation, if protein. Thus, genome modifications that render the bacteria thyA⁻ have advantages for particular applications, such as immunization, presentation on cells, delivery of RNA, and other such applications.

[0740] 3. Plasmid Maintenance and Delivery

[0741] a. asd Deletion

[0742] As discussed above, the bacteria can be rendered thyA⁻; they also can be rendered asd⁻ instead or in addition. The selection of the particular genome modification depends upon the intended application of the bacteria. thyA inactivation is advantageous for some applications; for others rendering the bacteria asd⁻ is advantageous; it is within the skill of the skilled person to select the particular modification(s). The asd gene in bacteria encodes an aspartate-semialdehyde dehydrogenase. asd⁻ mutants of S. typhimurium have an obligate requirement for diaminopimelic acid (DAP), which is required for cell wall synthesis, and will undergo lysis in environments deprived of DAP. This DAP auxotrophy can be used for plasmid selection and maintenance of plasmid stability in vivo, without the use of antibiotics, when the asd gene is complemented in trans on a plasmid in the bacterium. Non-antibiotic-based plasmid selection systems are advantageous, and allow for 1) the use of administered antibiotics as a rapid clearance mechanism in the event of adverse symptoms, and 2) for antibiotic-free scale up of production, where such use is commonly avoided. The asd gene complementation system provides for such non-antibiotic-based plasmid selection (see, e.g., Galán et al. (1990) Gene 94(1):29-35). The use of the asd gene complementation system to maintain plasmids in the tumor microenvironment is expected to increase the potency of S. typhimurium strains engineered to deliver plasmids encoding genetic payloads/therapeutic products, such as immunostimulatory proteins (e.g., cytokines, chemokines, co-stimulatory molecules); cytosolic DNA/RNA sensors that induce type I IFN, such as STING and IRF3, and gain-of-function/constitutively active mutants thereof, antibodies and fragments thereof (e.g., checkpoint inhibitors, or anti-IL-6 or anti-VEGF antibodies); bi-specific T-cell engagers (sold under the trademark BiTEs®); interfering RNAs; and other therapeutic products as discussed elsewhere herein and known in the art; and complementary combinations of all of the preceding therapeutic products.

[0743] An alternative use for an asd mutant of S. typhimurium is to exploit the DAP auxotrophy to produce an autolytic (or suicidal) strain, for delivery of therapeutic products/macromolecules to infected cells, without the ability to persistently colonize host tumors. Deletion of the asd gene makes the bacteria auxotrophic for DAP when grown in vitro or in vivo. An example described herein, provides an asd deletion strain that is auxotrophic for DAP, and that contains a plasmid suitable for delivery of immunomodulatory proteins, but that does not contain an asd complementing gene, resulting in a strain that is defective for replication in vivo. This strain is propagated in vitro in the presence of DAP, and grows normally, and then is administered as an immunotherapeutic agent to a mammalian host where DAP is not present. The suicidal strain is able to invade host cells but is not be able to replicate due to the absence of DAP in mammalian tissues, lysing automatically, and delivering its cytosolic contents (e.g., plasmids or proteins).

[0744] Corresponding genes, encoding homologs or orthologs of aspartate-semialdehyde dehydrogenase (asd) in other bacterial species, also can be deleted or disrupted to achieve similar results. These genes include, but are not limited to, for example, asd, encoding aspartate-semialdehyde dehydrogenase in E. coli; asd (STY4271), encoding aspartate-semialdehyde dehydrogenase in S. typhi; asd (lmo1437), encoding aspartate-semialdehyde dehydrogenase in L. monocytogenes; asd (BL0492), encoding aspartate-semialdehyde dehydrogenase in Bifidobacterium longum; and NT01CX_RS04325 (asd), encoding aspartate-semialdehyde dehydrogenase in Clostridium novyi. Similarly, as discussed, above, thyA can be inactivated or eliminated by genome modification in place of the asd modification. As discussed above, inactivation or elimination of thymidylate synthase expression/activity does not result in release of macromolecules, including proteins and plasmids, upon thymidine starvation.

[0745] b. endA Deletion/Disruption

[0746] The endA gene (see, for example, SEQ ID NO:250) encodes an endonuclease (DNA-specific endonuclease I; see, for example, SEQ ID NO:251) that mediates degradation of double-stranded DNA (dsDNA) in the periplasm of Gram-negative bacteria. Most common strains of laboratory E. coli are endA⁻, as a mutation in the endA gene allows for higher yields of plasmid DNA. This gene is conserved among species. To facilitate intact plasmid DNA delivery, the endA gene of the engineered immunostimulatory bacteria is deleted or mutated to prevent its endonuclease activity. Exemplary of such mutations is an E208K amino acid substitution (see, e.g., Durfee et al. (2008) J. Bacteriol. 190(7):2597-2606), or a corresponding mutation in the species of interest. endA, including residue E208, is conserved among bacterial species, including Salmonella. Thus, the E208K mutation can be used to eliminate endonuclease activity in other species, including Salmonella species. Those of skill in the art can introduce other mutations or deletions to eliminate endA activity. Effecting this mutation, or deleting or disrupting the gene to eliminate activity of endA in the immunostimulatory bacteria herein, such as in Salmonella, increases efficiency of intact plasmid DNA delivery, thereby increasing expression of any one, or two, or more, immunomodulatory proteins/therapeutic products encoded on the plasmid, and enhancing the anti-tumor immune response and anti-tumor efficacy.

[0747] 4. Flagellin Knockout Strains

[0748] Flagella are organelles on the surface of bacteria that are composed of a long filament that is attached, via a hook, to a rotary motor that can rotate in a clockwise or counterclockwise manner to provide a means for locomotion. Flagella, for example, in S. typhimurium, are important for chemotaxis and for establishing an infection via the oral route, due to the ability to mediate motility across the mucous layer in the gastrointestinal tract. While flagella have been demonstrated to be required for chemotaxis to and colonization of tumor cylindroids in vitro (see, e.g., Kasinskas and Forbes (2007) Cancer Res. 67(7):3201-3209), and motility has been shown to be important for tumor penetration (see, e.g., Toley and Forbes (2012) Integr. Biol. (Camb) 4(2):165-176), flagella are not required for tumor colonization in animals when the bacteria are administered intravenously (see, e.g., Stritzker et al. (2010) International Journal of Medical Microbiology 300:449-456). Each flagellar filament is composed of tens of thousands of flagellin subunits. The S. typhimurium chromosome contains two genes, fliC and fljB, that encode antigenically distinct flagellin monomers. Mutants defective for both fliC and fljB are nonmotile and avirulent when administered via the oral route of infection, but maintain virulence when administered parenterally.

[0749] Flagellin is a major pro-inflammatory determinant of Salmonella (see, e.g., Zeng et al. (2003) J. Immunol. 171:3668-3674), and is directly recognized by TLR5 on the surface of cells, and by NLCR4 in the cytosol (see, e.g., Lightfield et al. (2008) Nat. Immunol. 9(10):1171-1178). Both pathways lead to pro-inflammatory responses resulting in the secretion of cytokines, including IL-1β, IL-18, TNF-α, and IL-6. Attempts have been made to make Salmonella-based cancer immunotherapy more potent by increasing the pro-inflammatory response to flagellin by engineering the bacteria to secrete Vibrio vulnificus flagellin B, which induces greater inflammation than flagellin encoded by fliC and fljB (see, e.g., Zheng et al. (2017) Sci. Transl. Med. 9(376):eaak9537).

[0750] Herein, Salmonella bacteria, such as S. typhimurium, are engineered to lack both flagellin subunits fliC and fljB, to reduce TLR5-mediated pro-inflammatory signaling. Other bacteria that contain flagella similarly can be engineered to eliminate flagella, and to include other modifications that have the substantially the same effects as the exemplified modifications of Salmonella. For example, as shown herein, a Salmonella strain lacking msbB and/or pagP, which results in reduced TNF-alpha induction, is combined with elimination of flagella, which can be achieved in Salmonella by fliC and fljB knockouts. This results in a Salmonella strain that has a combined reduction in, among other effects, TNF-alpha induction and a reduction in TLR5 recognition. These bacterial modifications, msbB⁻, pagP⁻, fliC⁻, and fljB⁻, can be combined with an immunostimulatory plasmid, optionally containing CpGs, encoding therapeutic products, such as immunomodulatory proteins, and combinations of products. The resulting bacteria have reduced pro-inflammatory signaling, but robust anti-tumor activity. These genome modifications can be combined with others of the genome modifications described herein as well. For vaccines, the encoded products can include antigens and proteins against which an immmunoprotective or therapeutic response is intended.

[0751] For example, as exemplified and provided herein, a fliC and fljB double mutant was constructed in the asd-deleted strain of S. typhimurium, VNP20009. VNP20009, which is attenuated for virulence by disruption of purI/purM, and which contains a modification of the msbB gene (a partial deletion) that results the in production of a lipid A subunit that is less toxigenic than wild-type lipid A. This results in reduced TNF-α production in a mouse model after intravenous administration, compared to strains with wild-type lipid A. The resulting strain is exemplary of strains that are attenuated for bacterial inflammation by modification of lipid A to reduce TLR2/4 signaling, and by deletion of expression of the flagellin subunits to reduce TLR5 recognition and inflammasome induction.

[0752] Pathogenesis in certain bacterial species, including Salmonella species, such as S. typhimurium, involves a cluster of genes referred to as Salmonella pathogenicity islands (SPIs). Salmonella invades non-phagocytic intestinal epithelial cells using a type 3 secretion system (T3SS) encoded by the Salmonella pathogenicity island 1 (SPI-1), which forms a needle-like structure that injects effector proteins directly into the cytosol of host cells. These effector proteins lead to rearrangement of the eukaryotic cell cytoskeleton to facilitate invasion of the intestinal epithelium, and also induces proinflammatory cytokines. The SPI designated SPI-1 mediates invasion of epithelial cells. SPI-1 genes include, but are not limited to: avrA, hilA, hilD, invA, invB, invC, invE, invF, invG, invH, invI, invJ, iacP, iagB, spaO, spaP, spaQ, spaR, spaS, orgA, orgB, orgC, prgH, prgI, prgJ, prgK, sicA, sicP, sipA, sipB, sipC, sipD, sirC, sopB, sopD, sopE, sopE2, sprB, and sptP. Deletion of one or more of these genes reduces or eliminates the ability of the bacterium to infect epithelial cells, but does not affect their ability to infect or invade phagocytic cells, including phagocytic immune cells. For example, it was demonstrated that deletion of both the fliC and fljB genes significantly reduced expression of SPI-1 genes, such as hilA, hilD, invA, invF, and sopB, thereby reducing the ability to invade non-phagocytic cells (see, e.g., Elhadad et al. (2015) Infect. Immun. 83(9):3355-3368).

[0753] In bacteria such as Salmonella, flagellin, in addition to the SPI-1 type 3 secretion system (T3SS), is necessary for triggering pyroptosis in macrophages, and can be detected by the macrophage NLRC4 inflammasome. Elimination of flagellin subunits decreases pyroptosis in macrophages. For example, S. typhimurium with deletions in fliC and fljB results in significantly reduced IL-10 secretion compared to the wild-type strain, whereas cellular uptake and intracellular replication of the bacterium remains unaffected. This demonstrates that flagellin plays a significant role in inflammasome activation. Additionally, S. typhimurium strains engineered to constitutively express fliC were found to induce macrophage pyroptosis (see, e.g., Li et al. (2016) Scientific Reports 6:37447; Fink and Cookson (2007) Cellular Microbiology 9(11):2562-2570; and Winter et al. (2015) Infect. Immun. 83(4):1546-1555).

[0754] The genome of the immunostimulatory bacteria herein can be modified to delete or mutate the flagellin genes fliC and fljB in S. typhimurium, leading to decreased cell death of tumor-resident immune cells, such as macrophages, and enhancing the anti-tumor immune response of the immunostimulatory bacteria.

[0755] Deletion of the flagellin subunits, combined with modification of the LPS, allows for greater tolerability in the host, limits uptake into only phagocytic cells and decreases their pyroptotic cell death, and directs the immunostimulatory response towards delivery of therapeutic products, such as immunomodulatory proteins, to the TME, particularly tumor-resident myeloid cells. The resulting immunostimulatory bacteria elicit an anti-tumor response, and promote an adaptive immune response to the tumor.

[0756] Corresponding genes, encoding flagellin in other bacterial species, also can be deleted to achieve similar results. These genes include, but are not limited to, for example, fliC, encoding flagellar filament structural protein, and fliE, encoding flagellar basal-body protein FliE in E. coli; fliC, encoding flagellin and flgB, encoding flagellar basal-body rod protein FlgB, in S. typhi; flaA encoding flagellin, filE, encoding flagellar hook-basal body protein FliE, and flgB, encoding flagellar basal-body rod protein FlgB, in L. monocytogenes; and NT01CX_RS04995, NT01CX_RS04990, NT01CX_RS05070 and NT01CX_RS05075, encoding flagellin, NT01CX_RS05080 (flgB), encoding flagellar basal body rod protein FlgB, NT01CX_RS05085 (flgC), encoding flagellar basal body rod protein FlgC, and NT01CX_RS05215 (flgG), encoding flagellar basal body rod protein FlgG, in Clostridium novyi.

[0757] 5. Engineering Bacteria to Promote Adaptive Immunity and Enhance T-Cell Function

[0758] L-Asparaginase II (ansB) Deletion/Disruption

[0759] L-asparaginase II is an enzyme that catalyzes conversion of L-asparagine to ammonia and aspartic acid. Several bacterial strains, such as E. coli and S. typhimurium, utilize L-asparaginase to scavenge fructose-asparagine as a carbon and nitrogen source (see, e.g., Sabag-Daigle et al. (2018) Appl. Environ. Microbiol. 84(5):e01957-17). Malignant T-cells, such as in acute lymphoblastic leukemia (ALL), require asparagine as they lack the enzymes to synthesize it. Administration of L-asparaginases has been a frontline therapy for ALL since the early 1970's (see, e.g., Batool et al. (2016) Appl. Biochem. Biotechnol. 178(5):900-923). Production of L-asparaginase II by S. typhimurium is both necessary and sufficient for T-cell inhibition, as it directly induces T-cell receptor (TCR) downregulation, decreases T-cell cytokine production, and inhibits tumor cytolytic function (see, e.g., Kullas et al. (2012) Cell Host Microbe 12(6)791-798; and van der Velden et al. (2005) Proc. Natl. Acad. Sci. U.S.A. 102(49):17769-17774). Under rapid clonal expansion conditions, such as those that occur during T-cell activation in the tumor microenvironment, asparagine is required, and its depletion by L-asparaginase II leads to T-cell suppression. L-asparaginase II, thus, has been used as an anti-cancer therapeutic for cancers in which T-cell suppression is a therapeutic modality.

[0760] In contrast to the prior uses of L-asparaginase as an anti-cancer therapeutic, it is shown herein that elimination of L-asparaginase activity in the immunostimulatory bacteria provided herein, and in other immunostimulatory bacteria and bacterial vaccines, such as the BCG vaccine used for vaccinating against tuberculosis (TB) and other diseases, enhances the function of T-cells in the tumor microenvironment. Elimination of L-asparaginase activity can be effected by modifying the bacterial genome to eliminate expression of active enzyme. Modifications include insertions, deletions, replacements, and other changes in the nucleic acids, so that the resulting encoded enzyme is not active, or not expressed, or is eliminated. It is shown herein that deletion of all or of a part of the gene that encodes L-asparaginase II, ansB, or disruption thereof, to eliminate expression of the encoded enzyme in the immunostimulatory bacteria, enhances the function of T-cells in a bacterially-colonized tumor microenvironment. Inhibition of L-asparaginase II activity is accomplished by deletion of all or of a part of, or interruption/disruption of, the gene ansB in the immunostimulatory bacteria, whereby L-asparaginase II is not produced. Thus, provided are immunostimulatory bacteria whose genomes are modified so that L-asparaginase II is not produced. Immunostimulatory bacteria provided herein are employed to colonize tumor-resident immune cells to enhance the anti-tumor immune response; included among the bacterial genome modifications are deletions, insertions, disruptions, and/or other modifications that eliminate the expression of L-asparaginase II.

[0761] As shown herein, the genome of the immunostimulatory bacteria herein can be modified to delete ansB, or to disrupt it or to otherwise modify it, to result in inactive encoded L-asparaginase II, or to eliminate the asparaginase, thereby preventing T-cell suppression, and enhancing the anti-tumor T-cell function in vivo. It is shown herein that strains in which ansB is intact induce profound T-cell immunosuppression in T-cells co-localized with the strain. Strains in which ansB is deleted do not induce immunosuppression, thus, solving another problem in the art in using bacteria to deliver encoded therapeutic products to tumors. Immunostimulatory bacteria that combine modifications, such as deletions or disruptions, of the ansB gene, whereby functional encoded enzyme is not expressed, with other modifications described herein that result in increased accumulation in the tumor microenvironment and/or in tumor-resident immune cells, provide superior therapeutic immunostimulatory bacteria.

[0762] Corresponding genes, encoding homologs or orthologs of L-asparaginase II (AnsB) in other bacterial species, also can be deleted or disrupted to achieve similar results. These genes include, but are not limited to, for example, ansB, encoding L-asparaginase 2 in E. coli; ansB (STY3259), encoding L-asparaginase in S. typhi; ansB (lmo1663), encoding asparagine synthetase in L. monocytogenes; and BL 1142, encoding an L-asparaginase precursor in Bifidobacterium longum.

[0763] 6. Deletions/Disruptions in Salmonella Genes Required to Produce Curli Fimbriae

[0764] Bacteria and fungi are capable of forming multicellular structures called biofilms. Bacterial biofilms are encased within a mixture of secreted and cell wall-associated polysaccharides, glycoproteins, and glycolipids, as well as extracellular DNA, known collectively as extracellular polymeric substances. These extracellular polymeric substances protect the bacteria from multiple insults, such as cleaning agents, antibiotics, and antimicrobial peptides. Bacterial biofilms allow for colonization of surfaces, and are a cause of significant infection of prosthetics, such as injection ports and catheters. Biofilms also can form in tissues during the course of an infection, which leads to increases in the duration of bacterial persistence and shedding, and limits the effectiveness of antibiotic therapies. Chronic persistence of bacteria in biofilms is associated with increased tumorigenesis, for example in S. typhi infection of the gall bladder (see, e.g., Di Domenico et al. (2017) Int. J. Mol. Sci. 18:1887).

[0765] csgD Deletion

[0766] In Salmonella, such as S. typhimurium, biofilm formation is regulated by the csgD gene, which activates the csgBAC operon, and results in increased production of the curli fimbriae subunits CsgA and CsgB (see, e.g., Zakikhany et al. (2010) Molecular Microbiology 77(3):771-786). CsgA is recognized as a PAMP by TLR2, and induces production of IL-8 from human macrophages (see, e.g., Tukel et al. (2005) Molecular Microbiology 58(1):289-304). Also, csgD indirectly increases cellulose production by activating the adrA gene that encodes for di-guanylate cyclase. The small molecule cyclic di-guanosine monophosphate (c-di-GMP), generated by adrA, is a ubiquitous secondary messenger that occurs in almost all bacterial species. Increases in c-di-GMP enhance expression of the cellulose synthase gene bcsA, which in turn increases cellulose production via stimulation of the bcsABZC and bcsEFG operons, leading to cellulose biofilm formation. As a result, bacteria, such as S. typhimurium, can form biofilms in solid tumors as protection against phagocytosis by host immune cells. Bacterial mutants, such as Salmonella mutants, that cannot form biofilms, are taken up more rapidly by host phagocytic cells, and are more readily cleared from infected tumors (see, e.g., Crull et al. (2011) Cellular Microbiology 13(8):1223-1233). This increase in intracellular localization within phagocytic cells can reduce the persistence of extracellular bacteria, and, as shown herein, can enhance the effectiveness of plasmid delivery of therapeutic products, such as immunomodulatory proteins and other anti-cancer therapeutics, as described herein. Reduction in the capability of immunostimulatory bacteria, such as S. typhimurium, to form biofilms, can be achieved through deletion or disruption of genes involved in biofilm formation, such as, for example, csgD, csgA, csgB, adrA, bcsA, bcsB, bcsZ, bcsE, bcsF, bcsG, dsbA, or dsbB (see, e.g., Anwar et al. (2014) PLoS ONE 9(8):e106095).

[0767] It is shown herein that engineering the immunostimulatory bacteria to reduce biofilm formation increases clearance rates from tumors/tissues, increasing tolerability of the therapy, and prevents colonization of prosthetics in patients, thereby increasing the therapeutic benefit of these strains. It is known that adenosine mimetics inhibit S. typhimurium biofilm formation, indicating that the high adenosine concentration in the tumor microenvironment can contribute to tumor-associated biofilm formation (see, e.g., Koopman et al. (2015) Antimicrob. Agents Chemother. 59:76-84). It is shown herein that csgD-deleted immunostimulatory bacterial strains demonstrate improved anti-tumor efficacy because of greater bacterial uptake into tumor-resident myeloid cells. Similar genome modifications can be effected in other bacterial strains, such as E. coli and Listeria, that alter biofilm formation and/or curli fimbriae production, so that the bacteria can better infiltrate the vasculature, such as that present in tumors and the tumor microenvironment.

[0768] Corresponding genes, encoding homologs and orthologs of csgD, and other genes that are required for curli fimbriae and biofilm formation in other bacterial species, also can be deleted or disrupted or otherwise modified to achieve similar results. These genes include, but are not limited to, for example, csgD, encoding DNA-binding transcriptional dual regulator CsgD in E. coli; csgD (STY1179), encoding regulatory protein CsgD in S. typhi; and lcp, encoding the Listeria cellulose binding protein that is involved in biofilm formation in L. monocytogenes.

[0769] Modification of the bacterial genome, such as by deletion or disruption of genes to render the bacteria csgD⁻, results changes, such as one or more of elimination of curli fimbriae and inflammatory cyclic dinucleotides (CDNs), and removes cellulose secretion. This eliminates inflammatory and immunosuppressive elements, prevents TLR4 recognition through altered lipid A acylation, and eliminates cellulose secretion, and, thus, possible biofilm formation, thereby increasing safety and efficacy.

[0770] As described herein, bacterial strains, such as S. typhimurium strains, that are engineered to be auxotrophic for adenosine; and are reduced in their ability to induce pro-inflammatory cytokines by modification of the LPS and/or deletion of flagellin; and/or that do not express L-asparaginase II to improve T-cell function; and/or that contain deletions or disruptions of genes required for biofilm formation; and/or that are further modified to maintain significant plasmid copy number per cell, at least low to medium copy number or higher, in the absence of antibiotic selection; and that deliver genetic expression cassettes encoding therapeutic products, promote robust anti-tumor immune responses. The plasmids include regulatory sequences to promote secretion of the encoded therapeutic products into the tumor microenvironment.

[0771] 7. Improving Resistance to Complement

[0772] The complement system is the first line of immune defense against invading pathogens that directly activate the lectin pathway or the alternative pathway (AP) cascades in the human host. The complement system involves more than 30 soluble and cell-membrane bound proteins that function in the innate immune response to recognize and kill pathogens, such as bacteria, virus-infected cells, and parasites, and also, that play a role in the antibody-mediated immune response. Activation of the complement cascade leads to opsonization of foreign microbes, release of chemotactic peptides, and finally, to disruption of bacterial cell membranes. Three homologous glycoproteins in the complement system, C3, C4, and C5, play a central role in complement function and interact with other complement components. C3b and C4b, generated from C3 and C4, respectively, are important components of convertases that promote activation of the complement cascade. The cleavage fragments of C5 are C5a, which induces migration of phagocytes into the infection site, and C5b, which initiates the formation of the membrane attack complex (MAC), and bacterial lysis (see, e.g., Ramu et al. (2007) FEBS Letters 581:1716-1720).

[0773] To survive, pathogens have developed strategies to prevent deleterious consequences of complement activation. For example, members of the Ail/Lom family of outer membrane proteins provide protection from complement-dependent killing for a number of pathogenic bacteria. Members of the Ail/Lom family, which include Ail (attachment invasion locus) of Yersinia species, e.g., Y. enterocolitica and Y. pseudotuberculosis, Rck (resistance to complement killing) and PagC of Salmonella species, and OmpX of Escherichia coli, are outer membrane proteins that share significant amino acid sequence similarity and identity, and have similar membrane topologies. While members of this family of proteins exhibit diverse functions, several of them, including Ail of Y. enterocolitica and Y. pseudotuberculosis, as well as Rck of S. enterica, function, at least in part, to protect bacteria from complement-mediated lysis (see, e.g., Bartra et al. (2008) Infection and Immunity 76:612-622).

[0774] Another bacterial product that aids in avoiding or mitigating complement is the surface protease, designated PgtE (outer membrane serine protease) in Salmonella, and other members of the omptin family. The surface protease PgtE of S. enterica belongs to the omptin family of enterobacterial outer membrane aspartate proteases. PgtE and other omptins require rough LPS to be active, but are sterically inhibited by the O-antigen. Expression ofpgtE is upregulated during the growth of Salmonella inside macrophages, and the bacteria released from macrophages exhibit strong PgtE-mediated proteolytic activity. PgtE proteolytically activates the mammalian plasma proenzyme plasminogen to plasmin, inactivates the main physiological inhibitor of plasmin, alpha 2-antiplasmin, and mediates bacterial adhesion to extracellular matrices of human cells. This way, PgtE mediates the degradation of extracellular matrix components and generates potent, localized proteolytic activity, which can promote migration of Salmonella across extracellular matrices. PgtE also degrades alpha-helical antimicrobial peptides which can be important during intracellular growth of Salmonella. The omptin Pla of Yersinia pestis is a close ortholog of PgtE and shares functions with PgtE. Pla cleaves C3, and PgtE increases serum resistance of Salmonella by cleaving complement components C3b, C4b, and C5. The gene pgtE, and orthologs thereof from other bacterial species, can be included in the immunostimulatory bacteria herein to increase resistance to complement.

[0775] It is shown herein that the effects of complement in human serum explain the failure of therapeutic immunostimulatory bacteria, such as the Salmonella strain VNP20009, which had been shown to effectively colonize tumors in rodent models. Systemic administration of VNP20009 resulted in colonization of mouse tumors (see, e.g., Clairmont et al. (2000) J. Infect. Dis. 181:1996-2002; and Bermudes et al. (2001) Biotechnol. Genet. Eng. Rev. 18:219-33); whereas systemic administration of VNP20009 in human patients resulted in very little colonization. In the Phase 1 Study in advanced melanoma patients, very little VNP20009 was detected in human tumors after a 30 minute intravenous infusion (see, Toso et al. (2002) J. Clin. Oncol. 20:142-52). Patients that entered into a follow-up study evaluating a longer, four-hour infusion of VNP20009, also demonstrated a lack of detectable VNP20009 after tumor biopsy (see, Heimann et al. (2003) J. Immunother. 26:179-180). Following intratumoral administration, colonization of a derivative of VNP20009 was detected (see, Nemunaitis et al. (2003) Cancer Gene Ther. 10:737-744). Direct intratumoral administration of VNP20009 to human tumors resulted in much higher tumor colonization, indicating that human tumors can be colonized at a high level, and that the difference in tumor colonization between mice and humans occurs only after systemic administration.

[0776] It is shown and described herein, that, while not previously known to occur in wild-type S. typhimurium, VNP20009 is inactivated by human complement, which explains the low tumor colonization observed in humans upon systemic administration of VNP20009. Strains provided herein exhibit resistance to complement. They can be modified to express Rck and other proteins involved in mediating complement resistance or avoidance, such as Ail of Yersinia enterocolitica, or PgtE of Salmonella typhimurium, or, if they natively express such a protein, they can be modified to overexpress Rck and/or other such proteins. Rck can be introduced into bacteria, such as E. coli, that lack a homolog.

[0777] Rck Expression

[0778] Rck (resistance to complement killing) is a 17 kDa outer membrane protein encoded by the large virulence plasmid of Salmonella species, such as S. enteritidis and S. typhimurium, that induces adhesion to and invasion of epithelial cells. The Rck protein has been shown to protect S. enterica from complement by inhibiting C9 polymerization and subsequent assembly of a functional membrane attack complex. An rck mutant exhibited a 2-3 fold decrease in epithelial cell invasion compared to the wild-type strain, while rck overexpression in wild-type strains leads to increased invasion. The Rck protein induces cell entry by a receptor-mediated process, promoting local actin remodeling, and weak and closely adherent membrane extensions. Thus, Salmonella can enter cells by two distinct mechanisms: the Trigger mechanism mediated by the T3SS-1 complex, and a Zipper mechanism induced by rck (see, e.g., Manon et al. (2012), Salmonella, Chapter 17, eds. Annous and Gurtler, Rijeka, pp. 339-364). Expression of rck on the Salmonella virulence plasmid confers a high level of resistance to neutralization by human complement, by preventing the formation of the membrane attack complex. When the S. typhimurium virulence plasmid containing rck was expressed in a highly serum-sensitive strain of E. coli, Rck was able to restore complement resistance.

[0779] The immunostimulatory bacteria provided herein retain, or are provided with, Rck to confer resistance to human complement. It is shown herein that immunostimulatory bacteria, such as E. coli, can be modified by encoding rck on a plasmid in the bacteria to thereby confer resistance to complement. Immunostimulatory bacteria provided herein encode rck, either endogenously, or can be modified to encode it in order to increase resistance to complement. Methods for conferring resistance to complement also are provided. For example, the therapeutic E. coli species described in U.S. Patent Application Publication Nos. 2018/0325963 and 2018/0273956, and U.S. Pat. Nos. 9,889,164 and 9,688,967, can be improved by modifying the bacteria therein, such as by introducing nucleic acid encoding the Salmonella rck gene on a plasmid therein, to thereby improve or provide resistance to complement. Bacteria that are resistant to complement can be systemically administered, and sufficient bacteria can survive to be therapeutically effective.

[0780] Nucleic acids encoding the Salmonella rck gene are introduced into bacteria, such as therapeutic E. coli, to thereby confer or increase complement resistance.

[0781] Other orthologs and homologs of rck from other bacterial species, similarly can be expressed in the immunostimulatory bacteria. For example, Ail is an Rck homolog from Yersinia enterocolitica, which enhances complement resistance under heterologous expression. PgtE is an S. typhimurium surface protease that has also been shown to enhance complement resistance under heterologous expression.

[0782] 8. Deletions of Genes Required for Lipoprotein Expression in Salmonella and Other Gram-Negative Bacteria

[0783] The LPS and Braun (murein) lipoprotein (Lpp) are major components of the outer membrane of Gram-negative enteric bacteria that function as potent stimulators of inflammatory and immune responses. Braun (murein) lipoprotein (Lpp) is one of the most abundant components of the outer membrane in S. typhimurium, and leads to TLR2 induction of pro-inflammatory cytokines, such as TNFα, IL-6, and IL-8 (in humans). Two functional copies of the lipoprotein gene (lppA (SEQ ID NO:387) and lppB (SEQ ID NO:388)), that are located on the bacterial chromosome of Salmonella, contribute to bacterial virulence. Deletion of the lppA and lppB genes, and elimination of lipoprotein expression, reduces virulence and decreases pro-inflammatory cytokine production (see, e.g., Sha et al. (2004) Infect. Immun. 72(7):3987-4003; and Fadl et al. (2005) Infect. Immun. 73(2):1081-1096). Deletion of the Lpp genes would be expected to reduce infection of cells, and, thus, decrease plasmid delivery and expression of the encoded therapeutic products or proteins. As shown in Example 18 below, however, while deletion of these genes did reduce tumor colonization, the amount of plasmid delivered to the targeted cells, i.e., the tumor-resident immune cells, particularly macrophages, significantly was increased. As shown herein, deletion or disruption of these genes (lppA and lppB), thus, results in decreased virulence due to the inability to survive in infected macrophages, but results in enhanced plasmid delivery by the immunostimulatory bacteria, thereby increasing the expression of encoded therapeutic genes in the targeted cells, i.e., the tumor-resident immune cells, particularly macrophages.

[0784] Strains provided herein are ΔFLG (lack flagella), and/or ΔpagP, and/or ΔansB, and/or ΔcsgD. Additionally, the strains are one or more of ΔpurI (ΔpurM), ΔmsbB, and Δasd (in the bacterial genome). Exemplary strains are ΔpurI (ΔpurM), ΔmsbB, ΔpagP, ΔansB, Δasd, or ΔthyA in place of Δasd. The strains also can be lppA⁻ and/or lppB⁻, particularly lppA⁻ lppB⁻. The plasmid is modified to encode therapeutic products under control of host-recognized promoters (e.g., eukaryotic promoters, such as RNA polymerase II promoters, including those from eukaryotes, and from animal viruses). The plasmids can encode asd to permit bacterial replication in vivo, and can encode nucleic acids with other beneficial functions (such as CpGs), and can encode gene products, as described elsewhere herein.

[0785] The immunostimulatory bacteria provided herein can be modified to eliminate the ability to infect epithelial cells, such as by elimination of the flagella. Elimination of the ability to infect epithelial cells, as described elsewhere herein, also can be achieved by inactivating SPI-1-dependent invasion, through inactivation or knockout of one or more genes involved in the SPI-1 pathway. These genes include, but are not limited to, one more of: avrA, hilA, hilD, invA, invB, invC, invE, invF, invG, invH, invI, invJ, iacP, iagB, spaO, spaP, spaQ, spaR, spaS, orgA, orgB, orgC, prgH, prgI, prgJ, prgK, sicA, sicP, sipA, sipB, sipC, sipD, sirC, sopB, sopD, sopE, sopE2, sprB, and sptP. Additionally or alternatively, the immunostimulatory bacteria can contain knockouts or deletions in genes to inactivate products involved in SPI-1-independent infection/invasion, such as one or more of the genes fljB, fliC, rck, pagN, hlyE, pefI, srgD, srgA, srgB, and srgC, and/or the immunostimulatory bacteria can contain knockouts or deletions to inactivate products of genes that induce cell death of tumor-resident immune cells, such as genes that encode proteins that are directly recognized by the inflammasome, including fljB, fliC, prgI (needle protein), and prgJ (rod protein). The rck gene is desirable because it protects the bacteria against inactivation by complement. Bacteria that do not endogenously encode rck, can be modified to encode a heterologous rck gene.

[0786] The immunostimulatory bacteria are derived from suitable bacterial strains. Bacterial strains can be attenuated strains, or strains that are attenuated by standard methods, or that, by virtue of the modifications provided herein, are attenuated in that their ability to colonize is limited primarily to immunoprivilaged tissues and organs, particularly tumor-resident immune cells, the TME, and tumor cells, including solid tumors. Bacteria include, but are not limited to, for example, strains of Salmonella, Shigella, Listeria, E. coli, and Bifidobacteriae. For example, species include Shigella sonnei, Shigella flexneri, Shigella dysenteriae, Listeria monocytogenes, Salmonella typhi, Salmonella typhimurium, Salmonella gallinarum, and Salmonella enteritidis. Other suitable bacterial species include Rickettsia, Klebsiella, Bordetella, Neisseria, Aeromonas, Francisella, Corynebacterium, Citrobacter, Chlamydia, Haemophilus, Brucella, Mycobacterium, Mycoplasma, Legionella, Rhodococcus, Pseudomonas, Helicobacter, Vibrio, Bacillus, and Erysipelothrix. For example, Rickettsia rickettsii, Rickettsia prowazekii, Rickettsia tsutsugamushi, Rickettsia mooseri, Rickettsia sibirica, Bordetella bronchiseptica, Neisseria meningitidis, Neisseria gonorrhoeae, Aeromonas eucrenophila, Aeromonas salmonicida, Francisella tularensis, Corynebacterium pseudotuberculosis, Citrobacter freundii, Chlamydia pneumoniae, Haemophilus somnus, Brucella abortus, Mycobacterium intracellulare, Legionella pneumophila, Rhodococcus equi, Pseudomonas aeruginosa, Helicobacter mustelae, Vibrio cholerae, Bacillus subtilis, Erysipelothrix rhusiopathiae, Yersinia enterocolitica, Rochalimaea quintana, and Agrobacterium tumerfacium.

[0787] Exemplary of the immunostimulatory bacteria provided herein are species of Salmonella. Exemplary of bacteria for modification as described herein are wild-type strains of Salmonella, such as the strain that has all of the identifying characteristics of the strain deposited in the American Type Culture Collection (ATCC) as accession #14028. Engineered strains of Salmonella typhimurium, such as strain YS1646 (ATCC catalog #202165, also referred to as VNP20009; see, also International PCT Application Publication No. WO 99/13053), is engineered with plasmids to complement an asd gene knockout and to allow for antibiotic-free plasmid maintenance. The strains then are modified to delete the flagellin genes, and/or to delete pagP. The combination of flagella knockout and pagP deletion renders the strains highly resistant to human serum complement. The strains also are rendered auxotrophic for purines, particularly adenosine, and are asd⁻ and msbB⁻. As exemplified, strains in which the purI and msbB genes are completely deleted are more fit (e.g., grow faster) that strain VNP20009, in which these genes are not deleted, but are modified to eliminate expression. The asd gene can be provided on a plasmid for in vivo replication in the eukaryotic host. The strains also have a modification, such as a deletion, disruption, or other modification, in the ansB gene, preventing them from producing immunosuppressive L-asparaginase II, and improving tumor T-cell function. The strains also are modified to eliminate biofilm production, such as by a csgD deletion, which renders them unable to produce curli fimbriae, cellulose, and c-di-GMP, reducing unwanted inflammatory responses, and preventing the strains from forming biofilms.

[0788] These genomic deletions and plasmids are described and exemplified elsewhere herein. Any of the nucleic acid encoding therapeutic products, such as immunostimulatory proteins and other products, described elsewhere herein and/or known to those of skill in the art, can be included on the plasmid. The plasmid generally is present in low to medium copy number, as described elsewhere herein. Therapeutic products include gain-of-function mutants of cytosolic DNA/RNA sensors, that can constitutively evoke/induce type I IFN expression, and other immunostimulatory proteins, such as cytokines, chemokines, and co-stimulatory molecules, that promote an anti-tumor immune response in the tumor microenvironment, and other such products described herein. The plasmids also can encode antibodies, and fragments thereof, e.g., single-chain antibodies that target immune checkpoints and other cancer targets, such as VEGF, IL-6, and TGF-0, and other molecules, such as bispecific T-cell engagers, or BiTEs®. The plasmids also can encode IL-6 binding decoy receptors, TGF-beta binding decoy receptors, and TGF-beta polypeptide antagonists.

[0789] 9. Robust Immunostimulatory Bacteria Whose Genomes are Optimized for Anti-Tumor Therapy, and that Encode Therapeutic Products, Including a Plurality Thereof

[0790] As described herein, bacterial strains, such as S. typhimurium strains, that are engineered to be adenosine auxotrophic, and are reduced in their ability to induce pro-inflammatory cytokines by modification of the LPS and/or deletion of flagellin, and/or are modified by deletion or elimination of L-asparaginase II expression to improve T-cell function, and/or are modified by deletion or disruption of genes required for biofilm formation, and/or that demonstrate enhanced human serum survival due to increased rck expression, are further modified to deliver therapeutic products, such as immunomodulatory proteins, and promote robust anti-tumor immune responses.

[0791] The table below summarizes the bacterial genotypes/modifications, with reference to Salmonella genes with the understanding that counterpart genes can be modified in other bacterial species, their functional effects, and some of the effects/benefits achieved herein.

| Genotype/Modification | Functional Effect | Effect/Benefit |
|---|---|---|
| Δasd (in genome) | Plasmid maintenance | Improves plasmid delivery |
| | | Plasmid maintenance in vivo via asd |
| | | cassette on plasmid |
| ΔpurI | Purine/adenosine | Tumor-specific enrichment |
| | auxotrophy | Limited replication in healthy tissue |
| ΔmsbB | LPS surface coat | Decreases TLR4 recognition |
| | modification | Reduces immunosuppressive cytokine |
| | | profile (TNF-α) |
| | | Improves safety |
| | | Prevents intracellular replication |
| ΔfliC/ΔfljB (ΔFLG) | Flagella knockout | Removes major inflammatory and |
| | | immune-suppressive element - lethal |
| | | inflammasome activation |
| | | Eliminates TLR5 recognition |
| | | Reduces immunosuppressive cytokine |
| | | profile, including suppression of type I |
| | | IFN |
| | | Improves safety |
| | | Reduces ability to invade non- |
| | | phagocytic cells (e.g., stromal and |
| | | tumor cells) |
| ΔpagP | LPS surface coat | Removes major inflammatory and |
| | modification | immunosuppressive element, |
| | | including suppression of type I IFN |
| | | Decreases TLR4 recognition |
| | | Reduces IL-6 production |
| | | Improves safety |
| ΔansB | L-asparaginase II | Enhances tumor T-cell function |
| | knockout | |
| ΔcsgD | Removes curli | Reduces inflammation, including IL- |
| | fimbriae, cellulose | 10 suppression of type I IFN, |
| | production, c-di- | Prevents possible biofilm formation |
| | GMP | Enhances phagocytic cell uptake |
| Plasmid | Expresses gene | Eukaryotic promoter limits expression |
| | products under | to cells containing the plasmid |
| | control of host- | Long term expression in the TME |
| | recognized promoter | (i.e., asd encoded on plasmid under |
| | | control of host-recognized promoter) |
| | | Expression of any combination of |
| | | therapeutic product(s) with large |
| | | capacity |

[0792] 10. Vaccines and Bacteria that Deliver RNA, Including mRNA and Other Forms of RNA, for Expression in a Eukaryotic Host

[0793] Immunostimulatory Bacteria as Delivery Vehicles for RNA

[0794] Provided are immunostimulatory bacteria that contain or that express encoded heterologous RNA, where the bacteria infect eukaryotic host cells, and release the encoded RNA into the cytoplasm of the host cell (see, e.g., U.S. Pat. No. 7,390,646). The RNA can be a therapeutic product, or the RNA is translated by the host cell machinery into a therapeutic product. Such products include immunostimulatory proteins and antigens from pathogens and/or tumor antigens that can be expressed in cells, such as phagocytic cell for presentation to induce immune responses including T-cell responses, memory T-cells, and antibodies. For immunization, the bacteria can be administered to the site or by a route that is the same as naturally-occurring route of the pathogen, such as by inhalation or nasal administration for respiratory viruses, oral administration for gastric and enteric pathogens, intramuscular administration, such as for viruses, and also systemic routes. This can result in in situ immune responses that can provide lifelong immunity.

[0795] Any of the immunostimulatory bacteria provided herein can be modified so that the bacteria produce the exogenous or heterologous RNA within the bacterial cells in vitro, such as during in vitro cell culture, or after entry of the bacterial cells into the host eukaryotic cells, or both during in vitro cell culture, and after entry of the bacterial cells into the host eukaryotic cells. Following infection of eukaryotic host cells, the bacteria release the exogenous RNA into the cytoplasm of the host cells. The RNA can be encoded on a plasmid in the bacteria, and can encode a plurality of therapeutic products. In particular, the forms of RNA delivered are any that can be translated by eukaryotic cell machinery. This includes mRNA, long non-coding RNA, RNAi, dsRNA, circular RNA (eRNA; see, e.g., U.S. Pat. No. 10,953,033).

[0796] Provided are immunostimulatory bacteria and genomically-modified bacteria that contain or express encoded heterologous RNA, where, when the bacteria infect eukaryotic host cells, the encoded RNA, such as mRNA, is released into the cytoplasm of the host cell. The bacteria include any of the immunostimulatory bacteria provided herein, and particularly, those that include genomic modifications, so that they have reduced TLR2, TLR4, and TLR5 signaling. The bacteria also can encode a therapeutic product or a plurality thereof, and particularly, encode immunostimulatory proteins, including cytokines and STING proteins, including the modified STING proteins provided herein, which can act as adjuvants if the RNA is encoding an antigen or protein for vaccination, or for a treatment for which immune stimulation is advantageous.

[0797] The nucleic acid encoding the RNA is modified so that it is transcribed in the bacteria, but is not translated. This can be effected by designing the nucleic acid so that the transcribed RNA product is not recognized by or cannot be translated by prokaryotic ribosomes. The encoding nucleic acid further is designed such that the transcript is recognized by and is translated by eukaryotic ribosomes, such as those present in a host, such as a human. This can be effected by, for example, including nucleic acid encoding an internal ribosome entry site (IRES) that is not recognized by prokaryotic ribosomes, but is recognized by eukaryotic ribosomes The encoded RNA typically is mRNA, but can be other forms of RNA that can be translated into therapeutic products or immunizing antigens or proteins. Other forms, of RNA include, but are not limited to, eRNA, which is circular RNA. eRNA is a circular polyribonucleotide that: (a) contains an expression sequence encoding a polypeptide, such as an antigen; (b) contains an internal ribosome entry site (IRES) that is not recognized by prokaryotic ribosomes, and a termination element; and (c) lacks a poly-A sequence, a free 3′ end, and an RNA polymerase recognition motif (see, e.g., U.S. Pat. No. 10,953,033, which describes such circular RNA). The bacteria are modified so that the transcribed RNA is circularized in vivo.

[0798] The RNA can be a therapeutic product, or the RNA is translated by the host cell machinery into a therapeutic product. The RNA can encode an antigen, whereby it is encoded into a protein when delivered into the host cells, to immunize the host against the antigen, and the pathogen or the tumor from which the antigen is derived. The nucleic acid can be modified so that the encoded antigen is modified to improve its properties for immunization, such as by stabilizing a conformation of the antigen against which antibodies and other adaptive immune responses are directed. This has been done, for example, for the spike proteins, on corona viruses, so that the conformation that binds to host cell receptors is stabilized, resulting in a more robust antibody response.

[0799] Any of the immunostimulatory bacteria provided herein can be modified so that the bacteria produce the exogenous or heterologous RNA within the bacterial cells in vitro, such as during in vitro cell culture, or after entry of the bacterial cells into the host eukaryotic cells, or both during in vitro cell culture and after entry of the bacterial cells into the host eukaryotic cells. Following infection of eukaryotic host cells, the bacteria release the exogenous RNA into the cytoplasm of the host cells. The RNA can be encoded on a plasmid in the bacteria, and can encode a plurality of therapeutic products.

[0800] The nucleic acid encoding the RNA is operably linked to a promoter recognized by the bacteria, or the bacteria are modified to encode the RNA polymerase that recognizes the promoter, such as a bacterial promoter, or a bacteriophage promoter that is recognized by phage T7 RNA polymerase. The RNA can be mRNA, or other RNA molecules that contain regulatory sequences for expression in a eukaryotic host cell. The promoter can be an inducible promoter. The bacteria can contain a plurality of copies of the encoded RNA, which, when introduced into a eukaryotic host, such as a human, is released into the host cell cytoplasm, where, if it is mRNA, it can be translated. Bacterial transcription is decoupled from bacterial translation, so that gene products are transcribed, but not translated. In some embodiments, rather than including an IRES sequence, the nucleic acid encoding the RNA lacks a Shine-Dalgarno (SD) sequence upstream of the start codon, whereby the RNA cannot be translated by bacterial or archaeal ribosomes, but can be translated by eukaryotic ribosomes. The RNA can contain sequences, such as a Kozak sequence, with a start codon recognized by eukaryotic ribosomes. Shine-Dalgarno sequences include, for example SEQ ID NOs: 389-392:

(1)
... AUAAAGGAGGUAAAUAAUG [symbol]
(2)
... AUAAAGGAAAUAAAUAAUG [symbol]
(3)
... AUAACAGAGGUAAAUAAUG [symbol]
(4)
... AUAACAGGAGUAAAUAAUG [symbol]
Shine-Dalgarno start codon

(see, e.g., parts.igem.org/File:RBSAlignedSpacing.png). The RNA also can contain one or more Internal Ribosome Entry Site(s) (IRES), which block or inhibit translation by prokaryotic ribosomes. Thus, the RNA is produced in the bacteria, which infect or have infected myeloid cells, thereby delivering RNA to the myeloid cells, where, if it is mRNA, it is translated in the myeloid cells, which recognize the RNA for translation because of the Shine-Dalgarno sequence, or IRES, or other such regulatory sequence. Inserting, for example, an IRES between a promoter and a gene sequence, de-couples transcription from translation. The immunostimulatory bacteria, thus, serve as an RNA delivery system.

[0801] In embodiments, bacterial systems, such as the immunostimulatory bacteria provided herein, are used to deliver genetic payloads to tissue-resident and/or tumor-resident myeloid cells. In this context, the bacteria are dosed in vivo; the bacteria are, for example, asd⁻, and do not include a plasmid containing a complementing asd gene cassette, so that they cannot replicate in vivo. To grow the bacteria, they are cultured in vitro; diaminopimelic acid (DAP) is added to the culture medium to facilitate bacterial replication in the absence of a functional asd gene. In this context, when such immunostimulatory bacteria are administered, one bolus of nucleic acid is delivered to tissue-resident or tumor resident myeloid cells. After phagocytosis and intracellular destruction of the bacteria, the RNA encoding the therapeutic product(s) is released into the cytoplasm of the myeloid cells for translation, to produce the therapeutic product(s) that is/are secreted from the myeloid cells into the surrounding environment, such as the tumor microenvironment, when the infected cells are tumor-resident myeloid cells.

[0802] Bacteria cultured in vitro encode RNA, but lack the signals/regulatory sequences, such as the Shine-Dalgarno sequence, that are required to translate the RNA, or the encoding nucleic acid contains sequences, such as an IRES, that blocks or does not provide for translation by prokaryotic ribosomes, but that are recognized by eukaryotic ribosomes, so that the bacteria produce, but do not translate, the mRNA. The bacteria, which are modified as described herein, so that they infect or accumulate in tissue-resident or tumor-resident immune cells, particularly tissue-resident or tumor-resident myeloid cells, deliver the RNA to the myeloid cells, where it is translated. Any RNA can be delivered, including RNA encoding antigens, such as from pathogens or tumors, and/or encoding anti-viral therapeutics, which are expressed under control of a prokaryotic promoter. For such applications, the plasmids can be present in higher copy number (e.g., 150 copies or greater, such as 200, 300, 400, 500, or more copies, such as 500-700 copies), so that large amounts of the RNA is produced and delivered to the myeloid cells.

[0803] Also, as described and exemplified herein and discussed above, the encoding and regulatory sequences can be prepared so that the RNA is produced in the bacterium, but the encoding nucleic acid includes regulatory sequences that inhibit or prevent translation by bacterial ribosomes, but that are recognized by, and/or enhance, promote, or permit translation by, eukaryotic host ribosomes. For example, the mRNA is transcribed under control of a prokaryotic promoter. An IRES sequence is included in the transcript, which blocks translation in the prokaryotic bacterium, but, when delivered into a eukaryotic host cell, permits translation by eukaryotic ribosomes. The bacteria, thus, provide non-labile mRNA delivery systems. The bacteria can be grown in large quantities, and then can be lyophilized or frozen and/or stored at room temperature. They can be formulated into tablets, or powders, or can be micronized for inhalation.

[0804] The bacteria include those that contain genome modifications, whereby the response by toll-like receptors (TLRs) 2, 4, and 5 is reduced, compared to the bacterium without the genome modifications. These bacteria optionally can additionally contain genomic modifications so that they are auxotrophic for a required nutrient or factor, so that they are unable to replicate in a eukaryotic host, but can replicate in vitro when supplied with the nutrient or factor. These include deficiencies in adenosine biosynthesis, which has the ad added advantage of reducing immunosuppression when used for treatment of subjects with cancer who have tumors and a tumor microenvironment in which adenosine accumulates. Other deficiencies include thymine synthesis deficiencies, such as thyA⁻, described and discussed in sections above, and exemplified below.

[0805] The bacteria contain a plasmid containing nucleic acid encoding a product, or comprise RNA encoding the product. The plasmid can be present in low, medium, or high copy number. When used to deliver RNA, the plasmid can be present in high copy number, such as 150 copies or greater. The product encoded by the nucleic acid or RNA is an antigenic sequence or sequence from a pathogenic virus, bacterium, parasite, or is a tumor antigen, whereby, upon expression of the encoded antigen in the host, the host develops an immune-protective response or immunizing response against the pathogenic virus, bacterium, or parasite, or against the tumor antigen, or the product is a therapeutic product to be delivered to the host. Expression of the antigenic sequence(s) is/are under control of a prokaryotic promoter, so that RNA encoding the antigen(s) is produced in the bacterium, and, for RNA delivery, nucleic acid encoding the antigen comprises regulatory sequences that inhibit or prevent translation of encoded RNA by bacterial ribosomes, but that do not inhibit or prevent translation of the encoded RNA by eukaryotic host ribosomes, whereby translation is de-coupled from transcription in the bacterium. By virtue of the genomic modifications, the resulting bacterium is selective for infecting phagocytic cells when administered to a eukaryotic subject, and delivers the nucleic acid into the phagocytic cells, wherein the RNA is translated.

[0806] Of particular interest are the immunostimulatory bacteria provided herein that are modified so that they infect phagocytic cells, such as macrophages. In particular, the bacteria, which can be any suitable species/genus, such as Salmonella, Listeria, and E. coli, are so-modified so that they are one or more or all of modified to produce LPS with penta-acylated lipid A, modified to lack flagella, and modified to lack curli fimbriae; for example, the bacteria are msbB⁻/pagP⁻, flagellin⁻, and csgD⁻ (by modification by each of the encoding genes or equivalent genes in a particular species, so that the products are not produced, or, if produced, are inactive). The bacteria also are modified, such as by rendering them asd⁻, so that the can be grown in vitro by providing the appropriate nutrient, such a DAP, but so that they do not replicate in a eukaryotic host, and ultimately die when the mRNA is delivered into the eukaryotic cells. The bacteria also can encode additional payloads, as described herein, such as modified STING proteins and/or cytokines (all as described and listed elsewhere herein), which serve to stimulate the host immune system, thereby acting as adjuvants. Such products can be encoded on plasmids in the bacterium, and can be encoded on a polycistronic construct with the mRNA encoding the antigen, and/or can be encoded under control of a eukaryotic promoter for transcription/translation into proteins, as described throughout the disclosure herein. These proteins can be designed for transcription, or, as appropriate, can be modified so that they are membrane anchored for presentations. The immunostimulatory bacteria, such as E. coli, can be modified so that they encoded and express rck to increase resistance to complement.

[0807] 11. Bacterial Vaccines Against Particular Antigens, Including from Pathogens, and Also Antigens from Tumors, for Use as Anti-Pathogen Treatments and Vaccines, and for Anti-Cancer Treatment and/or Prevention

[0808] Vaccines can be used for preventing (reducing the risk) of contracting a disease or developing a disorder or cancer or as treatments for diseases, disorders, or cancers, and combinations thereof. Immunostimulatory bacteria provided herein and other vaccines can be used for these purposes.

[0809] Because of the similarity in the immune response between an anti-tumor response and an anti-viral response, the immunostimulatory bacteria provided herein also can be used to treat infectious diseases. The bacteria can encode an anti-viral or anti-bacterial therapeutic, such as an inhibitor of a viral or bacterial product, or an inhibitor of the expression of a viral or bacterial product, or a viral or bacterial antigen. The combination of the immune response from the immunostimulatory bacteria and the therapeutic anti-pathogen product, and also, to the immunostimulatory proteins and encoded immune-stimulating proteins, provides a therapeutic immunostimulatory bacterium for vaccinating against and/or treating infectious diseases, particularly diseases associated with viral infections, such as chronic viral infections and latent viral infections. Of interest are chronic viral infections, such as infections by hepatitis viruses, herpesviruses, varicella zoster virus (VZV), Epstein-Barr virus, human immunodeficiency virus (HIV), human T-cell leukemia virus (HTLV), Respiratory Syncytial Virus (RSV), measles virus, and other such viruses that chronically infect subjects. The immunostimulatory bacteria also can be used for the treatment of acute infections as well, such as initial infections with chronic influenza and coronaviruses, such as Severe Acute Respiratory Syndrome coronavirus (SARS-CoV), Middle East Respiratory Syndrome coronavirus (MERS-CoV), and Severe Acute Respiratory Syndrome coronavirus 2 (SARS-CoV-2, which causes COVID-19). The immunostimulatory bacteria can encode an antigen from a pathogen, such as a viral antigen, and are used as a vaccine to prevent infection or to treat existing infections. The immunostimulatory bacterium, by virtue of its ability to accumulate in immune cells, such as antigen-presenting cells, such as T-cells, can promote a T-cell response to the virus. For example, immunostimulatory bacteria provided herein are deficient in asparaginase II, which enhances the function of T-cells to thereby promote the anti-viral response. The combination of expression of a viral antigen, such as an antigen from an essential viral protein, such as, for example, in the case of a coronavirus, an antigen from the Nucleocapsid, M and/or S proteins, which can result in neutralizing antibodies, and the enhancement of long-lived circulating and tissue-resident CD8⁺ T-cells, and provides effective vaccines and treatments.

[0810] The efficacy of existing vaccines, such as inactivated or attenuated vaccines, such as the Bacillus Calmette-Guerin (BCG) vaccine for tuberculosis (TB), can be improved by modifying the genome so that asparaginase is not expressed, thereby eliminating the immune suppression. BCG vaccine effectiveness is often reduced. This is by virtue of the asparaginase secreted by the vaccine bacteria, which decreases T-cell activity, thereby having an immuno-suppressive effect. This can be mitigated by modifying the bacteria to reduce or eliminate asparaginase activity. As discussed elsewhere herein, other modifications that reduce or eliminate TLR2 or TLR2/4/5 responses to the bacteria eliminate any blockade or inhibition of type I IFN by the activity or response of TLR2, or TLR4, or TLR5, or other toll-like receptors to bacteria. As described herein, the responses of the TLRs to bacteria can block or inhibit type I IFN; modifications of the bacteria herein by eliminating responses of these TLRs eliminate this undesirable effect.

[0811] As discussed in the section above, the immunostimulatory bacteria can encode an anti-viral therapeutic or an anti-bacterial therapeutic, or an antigen for immunization. Such therapeutics include inhibitors of viral genes and proteins, such as proteins required for replication and/or packaging, or the immunostimulatory bacteria can encode a therapeutic that prevents binding or interaction of a virus with a receptor or receptors that facilitate or provide for viral entry into a target cell. In some embodiments, the therapeutic protein can be under the control of a prokaryotic promoter. As discussed in the section above, the bacteria can be those that deliver RNA.

[0812] As discussed above, the bacteria can be used to deliver RNA, including mRNA for vaccination against pathogens, such as SARS-CoV, SARS-CoV-2, influenza, and other pathogens, and also, for anti-tumor therapy. The bacteria can also encode immunostimulants or other immune system enhancers, or inhibitors of immunosuppressors, such as immune checkpoint proteins. Exemplary of these are STING proteins, including the modified STING proteins provided herein, cytokines, and other such immune stimulating proteins. Any of the payloads described herein, including the combined payloads, that are for treating tumors, also can be encoded/delivered by the bacteria. Anti-tumor responses and anti-viral responses are similar. For the vaccines, the immunostimulatory payloads serve as adjuvants to enhance the immune response. The pathogen antigen-encoding nucleic acid is under control of a prokaryotic promoter; the other payloads also can be provided as a polycistronic construct with the pathogen antigen-encoding nucleic acid, or they can be encoded under control of a eukaryotic promoter, as described herein for the anti-tumor therapeutics.

[0813] Bacteria, such as those provided herein, that deliver payloads to phagocytic cells, and that contain the various genome modifications that improve their properties for delivery, can be used to deliver RNA. The bacteria are superior vehicles to nanoparticles and other such delivery vehicles, since the RNA is delivered in the bacterial cytoplasm and contains the adjuvants to stimulate type I IFN. Among the advantages of the bacteria provided herein for delivery of RNA are: 1) they allow for RNA delivery “without the RNA” the bacterial delivery vehicle obviates the need for complex RNA stability/manufacturing; 2) they result in direct targeting of phagocytic antigen presenting-cells (APCs); 3) they allow for the inclusion of payloads that provide type I IFN adjuvant activity; 4) they contain genome modification so that the bacteria do not replicate in the eukaryotic (such as human) host, such as by rendering the bacteria asd⁻ by inactivating endogenous asd activity and not encoding it on the plasmid; and 5) removal of bacterial products that are poor adjuvants by genome modification is possible, such as by eliminating the flagella, modifying the LPS, reducing or eliminating biofilm formation, as well as the elimination of asparaginase II activity. Exemplary of these bacteria are those that are msbB⁻/pagP⁻, and flagellin-, and optionally, ansB⁻, and csgD⁻, with a complete (clean) deletion of the purI gene. Bacteria as vehicles also permit rapid engineering and deployment; bacteria are easily scalable and are easy to manufacture; a plurality of different RNAs can be encoded in a single bacterium; and bacteria are stable, and they can be stored at room temperature, they can be lyophilized, and they can be formulated for intranasal delivery or delivery by inhalation, as well as for intravenous delivery, and can be formulated for other suitable routes of delivery. Retaining some of the TLR2 activity renders endothelial vascular cells leaky, as does including the genome modification that renders the bacteria csgD⁻.

[0814] For delivery of anti-cancer therapeutic products to the tumor/tumor microenvironment, the encoded products can be operatively linked to trafficking signals, such as signals for secretion. The products also can be designed for expression on a cell surface, such as the cell surfaces of tumor-resident myeloid cells and other phagocytic cells. The gene products can be modified so that they are membrane anchored. For example, IL-12 has been modified herein so that it is membrane-anchored by adding a transmembrane domain to the C-terminus. Other proteins, including, for example, IL-2, IL-12, IL-12p35, IL-21, IL-15, and FLT-3L, can be similarly modified by adding a transmembrane domain or other such anchoring domain, such as a GPI anchor. Anchoring such proteins to the membranes of cells that are infected with the bacteria reduces toxicity so that they are not systemically secreted, but act in the tumor microenvironment. In particular, the immunostimulatory bacteria that encode such products and combinations thereof are those with genome modifications, such as, for example, modifications that result in the bacteria being msbB⁻/pagP⁻ and not having flagella, whereby the response by toll-like receptors (TLRs) 2, 4, and 5 is reduced, compared to the bacteria without the genome modifications.

[0815] 12. Conversion of M2 Phenotype Macrophages into M1 and M1-Like Phenotype Macrophages

[0816] As described herein, the immunostimulatory bacteria provided herein accumulate in and/or target macrophages. Macrophages are phagocytic immune cells; they play a role in clearing senescent and apoptotic cells, as well as in the phagocytosis of immune-related complexes and pathogens, and in the maintenance of homeostasis. The phenotype and function of macrophages can be polarized by the microenvironment. There are two types: M1-type (classically activated) macrophages, and M2-type (alternatively activated) macrophages.

[0817] The role of M1 macrophages is to secrete pro-inflammatory cytokines and chemokines, and to present antigens, and thus, to participate in the positive immune response, and function as immune monitors. M1 macrophages produce pro-inflammatory cytokines, including IL-6, IL-12, and TNF-alpha. M2 macrophages secrete arginase 1, IL-10, TGF-β, and other anti-inflammatory cytokines, which have the function of reducing inflammation, and contributing to tumor growth and immunosuppressive function. Thus, for the treatment of cancers and other such diseases and disorders, the M1 or M1-like phenotype is advantageous.

[0818] M2 macrophages can be converted into M1 macrophages or into macrophages with an M1-like phenotype. Immunostimulatory bacteria provided herein, which infect macrophages, can convert M2 macrophages into macrophages with an M1 or M1-like phenotype. M1 macrophage phenotypic markers include CD80 (also known as B7, B7.1, or BB1), CD86 (also known as B7.2), CD64 (also known as high affinity immunoglobulin gamma Fc receptor I), CD16, and CD32 (also known as low affinity immunoglobulin gamma Fc region receptor IIb). Expression of nitric oxide synthase (iNOS) in M1 macrophages can also serve as a phenotypic marker. CD163 and CD206 are markers for the identification of M2 macrophages. Arginase 1 (Arg1) and Dectin-1 also are ideal phenotypic indicators for the identification of M2 macrophages. The phenotypic conversion can be monitored or assessed by virtue of expression of these markers, and/or other markers that are characteristic of such macrophage phenotypes.

[0819] Tumor-associated macrophages (TAMs) are associated with an immunosuppressive M2 phenotype. Immunostimulatory bacteria provided herein can convert such macrophages into macrophages with an M1 or M1-like phenotype. The immunostimulatory bacteria provided herein, that encode a therapeutic product that leads to expression of type I interferon (IFN), can effect such conversion. This a property unique to the immunostimulatory bacteria provided herein, and exploits the ability of the bacteria that include genomic modifications that result in the infection of macrophages. The encoded therapeutic products include those that are part of a cytosolic DNA/RNA sensor pathway, such as the STING variants (described in detail herein). The encoding immunostimulatory bacteria can effect conversion of the infected macrophages to an M1 phenotype (or an M1-like phenotype) upon infection of the tumor-resident macrophages, and expression of the therapeutic product(s). This ability to convert macrophage phenotypes is demonstrated and exemplified in Example 12 below. The expression of a modified STING protein by immunostimulatory bacteria provided herein that infect macrophages and express the STING protein, converts the phenotype of M2 macrophages to an M1-like phenotype.

[0820] Immunostimulatory bacteria provided herein, that include genome modifications as described herein, such as the elimination of flagella and LPS modification, convert infected M2 macrophages into those that induce some or all of the cytokine profiles characteristic of M1 macrophages. Immunostimulatory bacteria that express a variant STING protein that results in constitutive type I IFN expression in human primary M2 macrophages, convert these cells to M1-like (having phenotypic markers and/or expression profiles typical of M1 macrophages) type I IFN producing cells.

### D. Immunostimulatory Bacteria with Enhanced Therapeutic Index Encoding Genetic Payloads that Stimulate the Immune Response in the Tumor Microenvironment

[0821] The immunostimulatory bacteria provided herein are modified so that they accumulate in the tumor microenvironment, and in tumor-resident myeloid cells, where encoded therapeutic products, under the control of eukaryotic promoters, are expressed. The bacteria encode therapeutic products, particularly anti-cancer products, including products that stimulate the immune system, and/or that reverse or mitigate the immunosuppressive effects of tumors. As described herein, the bacteria can encode a plurality of products, where expression of each product is under the control of a separate promoter, or expression of the products is under the control of one promotor, and the expression cassette can include sequences that result in expression of the discrete products, and, where appropriate, includes regulatory sequences to ensure secretion of the encoded products into the tumor microenvironment. The immunostimulatory bacteria express encoded therapeutic products on the plasmid. As discussed herein, the plasmid can encode one product, or a plurality thereof. Each product can be expressed under the control of a different eukaryotic promoter, or multiple encoded products can be expressed under the control of a single promoter, such as by including 2A self-cleaving peptides between the coding portions, such as T2A (SEQ ID NO:327), P2A (SEQ ID NO:328), E2A (SEQ ID NO:329), and F2A (SEQ ID NO:330). The encoded products include those described herein, and they can be anti-cancer immune stimulating products whose activities are complementary. The immunostimulatory bacteria provided herein permit the combinatorial administration of multiple immunomodulatory products or payloads (multiplexed payloads) that would otherwise be too toxic if systemically administered. Exemplary of multiplexed payloads include one or more cytokine(s), an immunostimulatory protein to stimulate or induce expression of type I IFN, such as STING or a variant thereof that has increased activity or that is constitutively active, and a co-stimulatory molecule, such as an engineered 4-1BBL co-stimulatory molecule.

[0822] The immunostimulatory bacteria provided herein have strong anti-tumor effects, including provision of cures, such as after IV dosing with the multiplexed payloads or single agent payloads. The immunostimulatory bacteria, when systemically administered, infiltrate and enrich in solid tumors, in the TME, and in tumor-resident myeloid cells, in which the encoded therapeutic products are expressed and then locally delivered to the tumor microenvironment. Upon consumption (phagocytosis) by tumor-resident myeloid cells, the bacteria deliver a genetic payload-encoding plasmid, which allows for ectopic, single or multiplexed payload expression in a tumor-specific manner.

[0823] 1. Immunostimulatory Proteins

[0824] The immunostimulatory bacteria herein can be modified to encode one or more of an immunostimulatory protein that promotes, induces, or enhances an anti-tumor response. As exemplified and described herein, the order in which the encoding nucleic acids are arranged on the plasmid can improve overall expression, and modifications to the plasmids, such as complete deletions or inactivation of genes, can improve the fitness of the bacteria that contain the plasmids encoding the proteins.

[0825] The immunostimulatory protein(s) can be encoded on a plasmid in the bacterium, under the control of a eukaryotic promoter, such as a promoter recognized by RNA polymerase II, for expression in a eukaryotic subject, particularly the subject for whom the immunostimulatory bacterium is to be administered, such as a human. The nucleic acid encoding the immunostimulatory protein(s) can include, in addition to the eukaryotic promoter, other regulatory signals for expression or trafficking in the cells, such as for secretion or expression on the surface of a cell.

[0826] Immunostimulatory proteins are those that, in the appropriate environment, such as a tumor microenvironment (TME), can promote, or participate in, or enhance, an anti-tumor response by the subject to whom the immunostimulatory bacterium is administered. Immunostimulatory proteins include, but are not limited to, cytokines, chemokines, and co-stimulatory molecules. These include cytokines, such as, but not limited to, IL-2, IL-7, IL-12, IL-15, IL-18, IL-21, IL-23, IL-12p70 (IL-12p40+IL-12p35), IL-15/IL-15R alpha chain complex, IL-367, GM-CSF, IFNα, IFNβ, IL-2 that has attenuated binding to IL-2Ra, and IL-2 that is modified so that it does not bind to IL-2Ra; chemokines, such as, but not limited to, CCL3, CCL4, CCL5, CXCL9, CXCL10, and CXCL11; and/or co-stimulatory molecules, such as, but not limited to, CD40, CD40L, OX40, OX40L, 4-1BB, 4-1BBL, 4-1BBL with the cytoplasmic domain truncated or deleted (4-1BBLΔCyt), members of the TNF/TNFR superfamily (e.g., CD27 and CD27L), and members of the B7-CD28 family (e.g., CD80, CD86, ICOS, and ICOS ligand (B7RP1)).

[0827] Other such immunostimulatory proteins, that are used for the treatment of tumors, or that can promote, enhance or otherwise increase or evoke an anti-tumor response, that are known to those of skill in the art, are contemplated for encoding in the immunostimulatory bacteria provided herein. For example, the immunostimulatory bacteria can deliver a genetic payload encoding a truncated co-stimulatory molecule (e.g., 4-1BBL, CD80, CD86, CD27L, B7RP1, and OX40L), with a full or partial cytoplasmic domain deletion, for expression on an APC, where the truncated gene product is capable of constitutive immuno-stimulatory signaling to a T-cell through co-stimulatory receptor engagement, and is unable to counter-regulatory signal to the APC due to a deleted or truncated cytoplasmic domain. As described elsewhere herein, the modified truncated cytoplasmic domain, for example, of 4-1BBL, contains particular residues to ensure proper orientation of the protein domains, which increases expression of the protein. Deletion (full or partial), and modification, of the cytoplasmic domain of co-stimulatory molecules, potentiates the activation of the co-stimulatory molecule, without the immunosuppressive reverse signaling.

[0828] a. Cytokines and Chemokines

[0829] In some embodiments, the immunostimulatory bacteria provided herein are engineered to express cytokines to stimulate the immune system, including, but not limited to, for example, IL-2, IL-7, IL-12, IL-12p70 (IL-12p40+IL-12p35), IL-15, the IL-15/IL-15R alpha chain complex (IL-15Rα-ILL-15sc), IL-18, IL-21, IL-23, IL-36γ, IL-2 that has attenuated binding to IL-2Ra, IL-2 that is modified so that it does not bind to IL-2Ra, IFN-α, and IFN-β. Cytokines stimulate immune effector cells and stromal cells at the tumor site, and enhance tumor cell recognition by cytotoxic cells. In some embodiments, the immunostimulatory bacteria can be engineered to express chemokines, such as, for example, CCL3, CCL4, CCL5, CXCL9, CXCL10, and CXCL11.

[0830] IL-2

[0831] Interleukin-2 (IL-2), which was the first cytokine approved for the treatment of cancer, is implicated in the activation of the immune system by several mechanisms, including the activation and promotion of cytotoxic T lymphocyte (CTL) growth, the generation of lymphokine-activated killer (LAK) cells, the promotion of regulatory T-cell (Treg cell) growth and proliferation, the stimulation of tumor-infiltrating lymphocytes (TILs), and the promotion of T-cell, B cell, and NK cell proliferation and differentiation. Recombinant IL-2 (rIL-2) is FDA-approved for the treatment of metastatic renal cell carcinoma (RCC) and metastatic melanoma (see, e.g., Sheikhi et al. (2016) Iran J. Immunol. 13(3):148-166).

[0832] IL-7

[0833] IL-7, which is a member of the IL-2 superfamily, is implicated in the survival, proliferation, and homeostasis of T-cells. Mutations in the IL-7 receptor have been shown to result in the loss of T-cells, and the development of severe combined immunodeficiency disease (SCID), highlighting the critical role that IL-7 plays in T-cell development. IL-7 is a homeostatic cytokine that provides continuous signals to resting naïve and memory T-cells, and which accumulates during conditions of lymphopenia, leading to an increase in both T-cell proliferation and T-cell repertoire diversity. In comparison to IL-2, IL-7 is selective for expanding CD8⁺ T-cells over CD4⁺FOXP3⁺ regulatory T-cells. Recombinant IL-7 has been shown to augment antigen-specific T-cell responses following vaccination and adoptive cell therapy in mice. IL-7 also can play a role in promoting T-cell recovery following chemotherapy of hematopoietic stem cell transplantation. Early phase clinical trials on patients with advanced malignancy have shown that recombinant IL-7 is well-tolerated and has limited toxicity at biologically active doses (i.e., in which the numbers of circulating CD4⁺ and CD8⁺ T-cells is increased by 3-4 fold) (see, e.g., Lee, S. and Margolin, K. (2011) Cancers 3:3856-3893). IL-7 has been shown to possess antitumor effects in tumors, such as gliomas, melanomas, lymphomas, leukemia, prostate cancer, and glioblastomas, and the in vivo administration of IL-7 in murine models resulted in decreased cancer cell growth. IL-7 also has been shown to enhance the antitumor effects of IFN-γ in rat glioma tumors, and to induce the production of IL-1α, IL-1β, and TNF-α by monocytes, which results in the inhibition of melanoma growth. Additionally, administration of recombinant IL-7 following the treatment of pediatric sarcomas resulted in the promotion of immune recovery (see, e.g., Lin et al. (2017) Anticancer Research 37:963-968).

### IL-12 (IL-12p70 (IL-12p40+IL-12p35))

[0834] Bioactive IL-12 (IL-12p70), which promotes cell-mediated immunity, is a heterodimer, composed of p35 and p40 subunits, whereas IL-12p40 monomers and homodimers act as IL-12 antagonists. IL-12, which is secreted by antigen-presenting cells, promotes the secretion of IFN-7 from NK and T-cells, inhibits tumor angiogenesis, results in the activation and proliferation of NK cells, CD8⁺ T-cells, and CD4⁺ T-cells, enhances the differentiation of naïve CD4⁺ T-cells into Th1 cells, and promotes antibody-dependent cell-mediated cytotoxicity (ADCC) against tumor cells. IL-12 has been shown to exhibit antitumor effects in murine models of melanoma, colon carcinoma, mammary carcinoma, and sarcoma (see, e.g., Kalinski et al. (2001) Blood 97:3466-3469; Sheikhi et al. (2016) Iran J. Immunol. 13(3):148-166; and Lee, S. and Margolin, K. (2011) Cancers 3:3856-3893).

### IL-15 and IL-15:IL-15Rα (IL-15/IL-15Rα)

[0835] IL-15 is structurally similar to IL-2, and while both IL-2 and IL-15 provide early stimulation for the proliferation and activation of T-cells, IL-15 blocks IL-2 induced apoptosis, which is a process that leads to the elimination of stimulated T-cells and the induction of T-cell tolerance, limiting memory T-cell responses, and potentially limiting the therapeutic efficacy of IL-2 alone. IL-15 also supports the persistence of memory CD8⁺ T-cells for maintaining long-term antitumor immunity, and has demonstrated significant antitumor activity in pre-clinical murine models via the direct activation of CD8+ effector T-cells in an antigen-independent manner. In addition to CD8⁺ T-cells, IL-15 is responsible for the development, proliferation, and activation of effector natural killer (NK) cells (see, e.g., Lee, S. and Margolin, K. (2011) Cancers 3:3856-3893; and Han et al. (2011) Cytokine 56(3):804-810).

[0836] Il-IL-15/IL-15R alpha chain complex can be used instead of IL-15 because it has longer in vivo stability than monomeric IL-15, is 10- to 100-fold more active on immune cells than IL-15. IL-15/IL-15Rα stimulates the maturation, proliferation and anti-apoptotic maintenance of NK cells, γδ (gamma delta) T-cells and T-cells; and it promotes the survival of activated T-cells (CTLs) and generation of long-lived CD8+CD44^{hi} T-cell memory cells. Clinically, IL-15 is superior to IL-2 as it does not bind IL-2Ralpha, located on immunosuppressive Tregs, and does not induce activation-induced cell death (AICD) or extensive capillary leak syndrome. It is shown herein that there is synergy between the type I interferon, induced by the engineered STING, to enhance CD8+ cell functions. There is synergy to enhance myeloid-mediated T-cell recruitment and CD8+ T-cell function. They act synergistically to activate human dendritic cells (DCs) to induce anti-viral CD8+ T-cell responses to thereby induce anti-cancer immunity. It is shown herein that this combination induces a high cure rate in an animal model. Strong T-cell infiltration in murine orthotopic T-cell excluded tumors, and breakdown of the stromal tumor associated macrophage (TAM) barrier. Significant T-cell and NK recruitment were observed.

[0837] IL-15 and IL-15 receptor alpha (IL-15Rα) are coordinately expressed by antigen-presenting cells, such as monocytes and dendritic cells, and IL-15 is presented in trans by IL-15Rα to the IL-15Rβγc receptor complex expressed on the surfaces of CD8⁺ T-cells and NK cells. Soluble IL-15:IL15-Rα (IL-15/IL-15Rα) complexes have been shown to modulate immune responses via the IL-15Rβγc complex, and the biological activity of IL-15 has been shown to be increased 50-fold by administering it in a preformed complex of IL-15 and soluble IL-15Rα, which has an increased half-life compared to IL-15 alone. This significant increase in the therapeutic efficacy of IL-15 by pre-association with IL-15Rα has been demonstrated in murine tumor models (see, e.g., Han et al. (2011) Cytokine 56(3):804-810).

[0838] IL-18

[0839] IL-18 induces the secretion of IFN-7 by NK and CD8⁺ T-cells, enhancing their toxicity. IL-18 also activates macrophages and stimulates the development of Th1 helper CD4⁺ T-cells. IL-18 has shown promising anti-tumor activity in several preclinical mouse models. For example, administration of recombinant IL-18 (rIL-18) resulted in the regression of melanoma or sarcoma in syngeneic mice through the activation of CD4⁺ T-cells and/or NK cell-mediated responses. Other studies showed that IL-18 anti-tumor effects were mediated by IFN-γ, and involved antiangiogenic mechanisms. The combination of IL-18 with other cytokines, such as IL-12, or with co-stimulatory molecules, such as CD80, enhances the IL-18-mediated anti-tumor effects. Phase I clinical trials in patients with advanced solid tumors and lymphomas showed that IL-18 administration was safe, and that it resulted in immune modulatory activity and in the increase of serum IFN-7 and GM-CSF levels in patients, and in modest clinical responses. Clinical trials showed that IL-18 can be combined with other anti-cancer therapeutic agents, such as monoclonal antibodies, cytotoxic drugs, or vaccines (see, e.g., Fabbi et al. (2015) J. Leukoc. Biol. 97:665-675; and Lee, S. and Margolin, K. (2011) Cancers 3:3856-3893).

[0840] It was found that an attenuated strain of Salmonella typhimurium, engineered to express IL-18, inhibited the growth of subcutaneous (S.C.) tumors or pulmonary metastases in syngeneic mice without any toxic effects following systemic administration. Treatment with this engineered bacterium induced the accumulation of T-cells, NK cells, and granulocytes in tumors, and resulted in the intratumoral production of cytokines (see, e.g., Fabbi et al. (2015) J. Leukoc. Biol. 97:665-675).

[0841] Chemokines

[0842] Chemokines are a family of small cytokines that mediate leukocyte migration to areas of injury or inflammation, and that are involved in mediating immune and inflammatory responses. Chemokines are classified into four subfamilies, based on the position of cysteine residues in their sequences, namely XC-, CC-, CXC-, and CX3C-chemokine ligands, or XCL, CCL, CXCL, and CX3CL. The chemokine ligands bind to their cognate receptors and regulate the circulation, homing, and retention of immune cells, with each chemokine ligand-receptor pair selectively regulating a certain type of immune cell. Different chemokines attract different leukocyte populations, and form a concentration gradient in vivo, with attracted immune cells moving through the gradient towards the higher concentration of chemokine (see, e.g., Argyle D. and Kitamura, T. (2018) Front. Immunol. 9:2629; and Dubinett et al. (2010) Cancer J. 16(4):325-335). Chemokines can improve the anti-tumor immune response by increasing the infiltration of immune cells into the tumor, and facilitating the movement of antigen-presenting cells (APCs) to tumor-draining lymph nodes, which primes naïve T-cells and B cells (see, e.g., Lechner et al. (2011) Immunotherapy 3(11):1317-1340). The immunostimulatory bacteria provided herein can be engineered to encode chemokines, including, but not limited to, CCL3, CCL4, CCL5, CXCL9, CXCL10, and CXCL11.

[0843] CCL3, CCL4, CCL5

[0844] CCL3, CCL4, and CCL5 share a high degree of homology, and bind to CCR5 (CCL3, CCL4, and CCL5) and CCR1 (CCL3 and CCL5) on several cell types, including immature DCs and T-cells, in both humans and mice. Therapeutic T-cells have been shown to induce chemotaxis of innate immune cells to tumor sites, via the tumor-specific secretion of CCL3, CCL4, and CCL5 (see, e.g., Dubinett et al. (2010) Cancer J. 16(4):325-335).

[0845] The induction of the T helper cell type 1 (Th1) response releases CCL3. In vivo and in vitro studies of mice have indicated that CCL3 is chemotactic for both neutrophils and monocytes; specifically, CCL3 can mediate myeloid precursor cell (MPC) mobilization from the bone marrow, and has MPC regulatory and stimulatory effects. Human ovarian carcinoma cells transfected with CCL3 showed enhanced T-cell infiltration and macrophages within the tumor, leading to an improved anti-tumor response, and indicated that CCL3-mediated chemotaxis of neutrophils suppressed tumor growth. DCs transfected with the tumor antigen human melanoma-associated gene (MAGE)-1 that were recruited by CCL3 exhibited superior anti-tumor effects, including increased lymphocyte proliferation, cytolytic capacity, and survival, and decreased tumor growth, in a mouse model of melanoma. A combinatorial use of CCL3 with an antigen-specific platform for MAGE-1 has also been used in the treatment of gastric cancer. CCL3 production by CT26, a highly immunogenic murine colon tumor, slowed in vivo tumor growth; this process was driven by the CCL3-dependent accumulation of natural killer (NK) cells, and thus, IFNγ, resulting in the production of CXCL9 and CXLC10 (see, e.g., Allen et al. (2017) Oncoimmunology 7(3):e1393598; and Schaller et al. (2017) Expert Rev. Clin. Immunol. 13(11):1049-1060).

[0846] CCL3 has been used as an adjuvant for the treatment of cancer. Administration of a CCL3 active variant, ECI301, after radiofrequency ablation in mouse hepatocellular carcinoma increased tumor-specific responses, and this mechanism was further shown to be dependent on the expression of CCR1. CCL3 has also shown success as an adjuvant in systemic cancers, whereby mice vaccinated with CCL3 and IL-2 or granulocyte-macrophage colony-stimulating factor (GM-CSF), in a model of leukemia/lymphoma, exhibited increased survival (see, e.g., Schaller et al. (2017) Expert Rev. Clin. Immunol. 13(11):1049-1060).

[0847] CCL3 and CCL4 play a role in directing CD8⁺ T-cell infiltration into primary tumor sites in melanoma and colon cancers. Tumor production of CCL4 leads to the accumulation of CD103⁺ DCs; suppression of CCL4 through a WNT/β-catenin-dependent pathway prevented CD103′ DC infiltration of melanoma tumors (see, e.g., Spranger et al. (2015) Nature 523(7559):231-235). CCL3 was also shown to enhance CD4⁺ and CD8⁺ T-cell infiltration to the primary tumor site in a mouse model of colon cancer (see, e.g., Allen et al. (2017) Oncoimmunology 7(3):e1393598).

[0848] The binding of CCL3 or CCL5 to their receptors (CCR1 and CCR5), moves immature DCs, monocytes, and memory and T effector cells from the circulation into sites of inflammation or infection. For example, CCL5 expression in colorectal tumors contributes to T lymphocyte chemoattraction and survival. CCL3 and CCL5 have been used alone or in combination therapy to induce tumor regression and immunity in several preclinical models. For example, studies have shown that the subcutaneous injection of Chinese hamster ovary cells genetically modified to express CCL3, resulted in tumor inhibition and neutrophilic infiltration. In another study, a recombinant oncolytic adenovirus expressing CCL5 (Ad-RANTES-E1A) resulted in primary tumor regression, and blocked metastasis in a mammary carcinoma murine model (see, e.g., Lechner et al. (2011) Immunotherapy 3(11):1317-1340).

[0849] In a translational study of colorectal cancer, CCL5 induced an “antiviral response pattern” in macrophages. As a result of CXCR3-mediated migration of lymphocytes at the invasive margin of liver metastases in colorectal cancer, CCL5 is produced. Blockade of CCR5, the CCL5 receptor, results in tumor death, driven by macrophages producing IFN and reactive oxygen species. While macrophages are present in the tumor microenvironment, CCR5 inhibition induces a phenotypic shift from an M2 to an M1 phenotype. CCR5 blockade also leads to clinical responses in colorectal cancer patients (see, e.g., Halama et al. (2016) Cancer Cell 29(4):587-601).

[0850] CCL3, CCL4, and CCL5 can be used for treating conditions, including lymphatic tumors, bladder cancer, colorectal cancer, lung cancer, melanoma, pancreatic cancer, ovarian cancer, cervical cancer, or liver cancer (see, e.g., U.S. Patent Publication No. US 2015/0232880; and International Application Publication Nos. WO 2015/059303, WO 2017/043815, WO 2017/156349, and WO 2018/191654).

### CXCL9, CXCL10, CXCL11

[0851] CXCL9 (MIG), CXCL10 (IP10), and CXCL 11 (ITAC) are induced by the production of IFN-γ. These chemokines bind CXCR3, preferentially expressed on activated T-cells, and function both angiostatically, and in the recruitment and activation of leukocytes. Prognosis in colorectal cancer is strongly correlated to tumor-infiltrating T-cells, particularly Th1 and CD8⁺ effector T-cells; high intratumoral expression of CXCL9, CXCL10 and CXCL11 is indicative of good prognosis. For example, in a sample of 163 patients with colon cancer, those with high levels of CXCL9 or CXCL11 showed increased post-operative survival, and patients with high CXC expression had significantly higher numbers of CD3⁺ T-cells, CD4⁺ T-helper cells, and CD8+ cytotoxic T-cells. In liver metastases of colorectal cancer patients, CXCL9 and CXCL10 levels were increased at the invasive margin, and correlated with effector T-cell density. The stimulation of lymphocyte migration via the action of CXCL9 and CXCL10 on CXCR3 leads to the production of CCL5 at the invasive margin (see, e.g., Halama et al. (2016) Cancer Cell 29(4):587-601; and Kistner et al. (2017) Oncotarget 8(52):89998-90012).

[0852] In vivo, CXCL9 functions as a chemoattractant for tumor-infiltrating lymphocytes (TILs), activated peripheral blood lymphocytes, natural killer (NK) cells, and Th1 lymphocytes. CXCL9 also is critical for T-cell-mediated suppression of cutaneous tumors. For example, when combined with systemic IL-2, CXCL9 has been shown to inhibit tumor growth via the increased intratumoral infiltration of CXCR3+ mononuclear cells. In a murine model of colon carcinoma, a combination of the huKS1/4-IL-2 fusion protein with CXCL9 gene therapy achieved a superior anti-tumor effect and prolonged lifespan through the chemoattraction and activation of CD8⁺ and CD4⁺ T lymphocytes (see, e.g., Dubinett et al. (2010) Cancer J. 16(4):325-335; and Ruehlmann et al. (2001) Cancer Res. 61(23):8498-8503).

[0853] CXCL10, produced by activated monocytes, fibroblasts, endothelial cells and keratinocytes, is chemotactic for activated T-cells, and can act as an inhibitor of angiogenesis in vivo. Expression of CXCL10 in colorectal tumors has been shown to contribute to cytotoxic T lymphocyte chemoattraction and longer survival. The administration of immunostimulatory cytokines, such as IL-12, has been shown to enhance the anti-tumor effects generated by CXCL10. A dendritic cell (DC) vaccine primed with a tumor cell lysate, and transfected with CXCL10 had increased immunological protection and effectiveness in mice; the animals showed a resistance to a tumor challenge, a slowing of tumor growth, and longer survival time. In vivo and in vitro studies in mice using the CXCL10-mucin-GPI fusion protein resulted in tumors with higher levels of recruited NK cells compared to tumors not treated with the fusion protein. Interferons (which can be produced by plasmacytoid dendritic cells; these cells are associated with primary melanoma lesions and can be recruited to a tumor site by CCL20) can act on tumor DC subsets, for example, CD103⁺ DCs, which have been shown to produce CXCL9/10 in a mouse melanoma model, and have been associated with CXCL9/10 in human disease. CXCL10 also has shown higher expression in human metastatic melanoma samples relative to primary melanoma samples. Therapeutically, adjuvant IFN-α melanoma therapy upregulates CXCL10 production, whereas the chemotherapy agent cisplatin induces CXCL9 and CXCL10 (see, e.g., Dubinett et al. (2010) Cancer J. 16(4):325-335; Kuo et al. (2018) Front. Med. (Lausanne) 5:271; Li et al. (2007) Scand. J. Immunol. 65(1):8-13; and Muenchmeier et al. (2013) PLoS One 8(8):e72749).

[0854] CXCL10/11 and CXCR3 expression has been established in human keratinocytes derived from basal cell carcinomas (BCCs). CXCL11 also is capable of promoting immunosuppressive indoleamine 2,3-dioxygenase (IDO) expression in human basal cell carcinoma, as well as enhancing keratinocyte proliferation, which could reduce the anti-tumor activity of any infiltrating CXCR3⁺ effector T-cells (see, e.g., Kuo et al. (2018) Front. Med. (Lausanne) 5:271).

[0855] CXCL9, CXCL10 and CXCL11 can be encoded in oncolytic viruses for treating cancer (see, e.g., U.S. Patent Publication No. 2015/0232880; and International Application Publication No. WO 2015/059303). Pseudotyped oncolytic viruses or a genetically engineered bacterium encoding the gene for CXCL10 also can be used to treat cancer (see, e.g., International Application Publication Nos. WO 2018/006005 and WO 2018/129404).

[0856] b. Co-Stimulatory Molecules

[0857] Co-stimulatory molecules enhance the immune response against tumor cells, and co-stimulatory pathways are inhibited by tumor cells to promote tumorigenesis. The immunostimulatory bacteria herein can be engineered to express co-stimulatory molecules, such as, for example, CD40, CD40L, 4-1BB, 4-1BBL, 4-1BBL with a deletion of the cytoplasmic domain (4-1BBLΔcyt), 4-1BBL with a truncated cytoplasmic domain, OX40 (CD134), OX40L (CD252), other members of the TNFR superfamily (e.g., CD27, CD27 ligand, GITR, CD30, Fas receptor, TRAIL-R, TNF-β, HVEM, and RANK), B7, CD80, CD86, ICOS, ICOS ligand (B7RP1), and CD28. Additionally, the immunostimulatory bacteria can encode and express truncated co-stimulatory molecules (e.g., 4-1BBL, CD80, CD86, CD27L, B7RP1, OX40L), with a full or partial (complete, or truncated, or modified to ensure proper orientation when expressed in a cell) cytoplasmic domain deletion, for expression on an antigen-presenting cell (APC). The gene product with a truncated cytoplasmic domain, including a full deletion, exhibits constitutive immunostimulatory signaling to a T-cell through co-stimulatory receptor engagement, and is unable to counter-regulatory signal to the APC due to a truncated or deleted (or otherwise modified as described herein) cytoplasmic domain. The truncation is sufficient to provide the signaling, and for the modified co-stimulatory molecule to be unable to counter-regulatory signal to the APC. The complete or partial deletion of the cytoplasmic domain of a co-stimulatory molecule, as described herein, potentiates the activation of the co-stimulatory molecule, without the immunosuppressive reverse signaling. The partial deletion (or truncation) of the cytoplasmic domain is a sufficient deletion to achieve these effects, without affecting the expression of the co-stimulatory molecule, or the orientation of the expressed co-stimulatory molecule.

[0858] The co-stimulatory molecules also can be modified to eliminate or reduce the immunosuppressive intracellular/reverse signaling by modifications to the amino acids in the cytoplasmic domain, including insertions, deletions, and/or replacements. In particular, the co-stimulatory molecules are modified by modification, such as by replacement, of cytoplasmic domain phosphorylation sites. For example, replacing one or more Ser residues at an appropriate locus or loci, such as, for human 4-1BBL, Ser5 and Ser8, with a residue that reduces or eliminates reverse signaling.

[0859] The immunostimulatory bacteria herein also can be engineered to express agonistic antibodies against co-stimulatory molecules (e.g., 4-1BBL) to enhance the anti-tumor immune response.

### TNF Receptor Superfamily

[0860] The TNF superfamily of ligands (TNFSF) and their receptors (TNFRSF) are involved in the proliferation, differentiation, activation and survival of tumor and immune effector cells. Members of this family include CD30, Fas-L, TRAIL-R, and TNF-β, which induce apoptosis, and CD27, OX40L, CD40L, GITR-L, and 4-1BBL, which regulate B and T-cell immune responses. Other members include herpesvirus entry mediator (HVEM). The expression of TNFSF and TNFRSF by the immunostimulatory bacteria herein can enhance the anti-tumor immune response. It has been shown, for example, that the expression of 4-1BBL in murine tumors enhances immunogenicity, and that intratumoral injection of dendritic cells (DCs) with increased expression of OX40L can result in tumor rejection in murine models. Studies have also shown that injection of an adenovirus expressing recombinant GITR into B16 melanoma cells promotes T-cell infiltration and reduces tumor volume. Stimulatory antibodies against molecules such as 4-1BB, OX40 and GITR also can be encoded by the immunostimulatory bacteria to stimulate the immune system. For example, agonistic anti-4-1BB monoclonal antibodies have been shown to enhance anti-tumor CTL responses, and agonistic anti-OX40 antibodies have been shown to increase anti-tumor activity in transplantable tumor models. Additionally, agonistic anti-GITR antibodies have been shown to enhance anti-tumor responses and immunity (see, e.g., Lechner et al. (2011) Immunotherapy 3(11):1317-1340; and Peggs et al. (2009) Clinical and Experimental Immunology 157:9-19).

[0861] CD40 and CD40L

[0862] CD40, which is a member of the TNF receptor superfamily, is expressed by APCs and B cells, while its ligand, CD40L (CD154), is expressed by activated T-cells. Interaction between CD40 and CD40L stimulates B cells to produce cytokines, resulting in T-cell activation and tumor cell death. Studies have shown that anti-tumor immune responses are impaired with reduced expression of CD40L on T-cells or CD40 on dendritic cells. CD40 is expressed on the surface of several B-cell tumors, such as follicular lymphoma, Burkitt lymphoma, lymphoblastic leukemia, and chronic lymphocytic leukemia, and its interaction with CD40L has been shown to increase the expression of B7-1/CD80, B7-2/CD86, and human leukocyte antigen (HLA) class II molecules in the CD40⁺ tumor cells, as well as enhance their antigen-presenting abilities. Transgenic expression of CD40L in a murine model of multiple myeloma resulted in the induction of CD4⁺ and CD8⁺ T-cells, local and systemic anti-tumor immune responses, and reduced tumor growth. Anti-CD40 agonistic antibodies also induced anti-tumor T-cell responses (see, e.g., Marin-Acevedo et al. (2018) Journal of Hematology & Oncology 11:39; Dotti et al. (2002) Blood 100(1):200-207; and Murugaiyan et al. (2007) J. Immunol. 178:2047-2055).

[0863] 4-1BB and 4-1BBL

[0864] 4-1BB (CD137) is an inducible co-stimulatory receptor that is expressed primarily by T-cells and NK cells; it binds its ligand 4-1BBL, that is expressed on APCs, including DCs, B-cells, and monocytes, to trigger immune cell proliferation and activation. 4-1BB results in longer and more widespread responses of activated T-cells. Anti-4-1BB agonists and 4-1BBL fusion proteins have been shown to increase immune-mediated anti-tumor activity, for example, against sarcoma and mastocytoma tumors, mediated by CD4⁺ Th1 and tumor-specific CTL activity (see, e.g., Lechner et al. (2011) Immunotherapy 3(11):1317-1340; and Marin-Acevedo et al. (2018) Journal of Hematology & Oncology 11:39). 4-1BBL is negatively regulated by its cytoplasmic signaling domain. In the late-phase of 4-1BBL ligation on macrophages to T-cells, reverse signaling of the 4-1BBL cytoplasmic domain induces surface translocation of 4-1BBL to bind to form a signaling complex with TLR4. This induces high levels of TNF-α, comparable to LPS activation of TLR4, that leads to immunosuppression of the adaptive immune response (see, e.g., Ma et al. (2013) Sci. Signaling 295(6):1-11). Deletion of the cytoplasmic domain of 4-1BBL, as described herein, potentiates the activation of 4-1BBL without the immunosuppressive reverse signaling.

[0865] OX40 and OX40L

[0866] OX40 (CD134) is a member of the TNF receptor superfamily that is expressed on activated effector T-cells, while its ligand, OX40L is expressed on APCs, including DCs, B cells and macrophages, following activation by TLR agonists and CD40-CD40L signaling. OX40-OX40L signaling results in the activation, potentiation, proliferation and survival of T-cells, as well as the modulation of NK cell function and inhibition of the suppressive activity of Tregs. Signaling through OX40 also results in the secretion of cytokines (IL-2, IL-4, IL-5, and IFN-γ), boosting Th1 and Th2 cell responses. The recognition of tumor antigens by tumor-infiltrating lymphocytes (TILs) results in increased expression of OX40 by the TILs, which has been correlated with improved prognosis. Studies have demonstrated that treatment with anti-OX40 agonist antibodies or Fc-OX40L fusion proteins results in enhanced tumor-specific CD4⁺ T-cell responses and increased survival in murine models of melanoma, sarcoma, colon carcinoma, and breast cancer, while Fc-OX40L incorporated into tumor cell vaccines protected mice from subsequent challenge with breast carcinoma cells (see, e.g., Lechner et al. (2011) Immunotherapy 3(11):1317-1340; and Marin-Acevedo et al. (2018) Journal of Hematology & Oncology 11:39).

[0867] B7-CD28 Family

[0868] CD28 is a co-stimulatory molecule expressed on the surface of T-cells that acts as a receptor for B7-1 (CD80) and B7-2 (CD86), which are co-stimulatory molecules expressed on antigen-presenting cells. CD28-B7 signaling is required for T-cell activation and survival, and for the prevention of T-cell anergy, and results in the production of interleukins, such as IL-6.

[0869] Optimal T-cell priming requires two signals: (1) T-cell receptor (TCR) recognition of MHC-presented antigens, and (2) co-stimulatory signals resulting from the ligation of T-cell CD28 with B7-1 (CD80) or B7-2 (CD86) expressed on APCs. Following T-cell activation, CTLA-4 receptors are induced, which then outcompete CD28 for binding to B7-1 and B7-2 ligands. Antigen presentation by tumor cells is poor due to their lack of expression of co-stimulatory molecules, such as B7-1/CD80 and B7-2/CD86, resulting in a failure to activate the T-cell receptor complex. As a result, upregulation of these molecules on the surfaces of tumor cells can enhance their immunogenicity. Immunotherapy of solid tumors and hematologic malignancies has been successfully induced by B7, for example, via tumor cell expression of B7, or soluble B7-immunoglobulin fusion proteins. The viral-mediated tumor expression of B7, in combination with other co-stimulatory ligands, such as ICAM-3 and LFA-3, has been successful in preclinical and clinical trials for the treatment of chronic lymphocytic leukemia and metastatic melanoma. Additionally, soluble B7 fusion proteins have demonstrated promising results in the immunotherapy of solid tumors as single agent immunotherapies (see, e.g., Lechner et al. (2011) Immunotherapy 3(11):1317-1340; and Dotti et al. (2002) Blood 100(1):200-207).

[0870] 2. Constitutively Active Proteins that Stimulate the Immune Response and/or Type I IFN, Non-Human STING Proteins, STING Chimeras, and Modified Forms

[0871] Type I interferons (IFNs; also referred to as interferon type 1), include IFN-α and IFN-β, and are pleiotropic cytokines with antiviral, anti-tumor, and immunoregulatory activities. IFN-β is produced by most cell types; IFN-α primarily is produced by hematopoietic cells, particularly plasmacytoid dendritic cells. Type I IFNs are produced following the sensing of pathogen-associated molecular patterns (PAMPs) by pattern recognition receptors (PRRs). They are involved in the innate immune response against pathogens, mainly viral, and are potent immunomodulators that promote antigen presentation, mediate dendritic cell (DC) maturation, activate cytotoxic T lymphocytes (CTLs), natural killer (NK) cells and macrophages, and activate the adaptive immune system by promoting the development of high-affinity antigen-specific T-cell and B-cell responses and immunological memory.

[0872] Type I IFNs exhibit anti-proliferative and pro-apoptotic effects on tumors and have anti-angiogenic effects on tumor neovasculature. They induce the expression of MHC class I molecules on tumor cell surfaces, increase the immunogenicity of tumor cells, and activate cytotoxicity against them. Type I IFN has been used as a therapeutic for the treatment of cancers and viral infections. For example, IFN-α (sold under the trademark Intron®/Roferon®-A) is approved for the treatment of hairy cell leukemia, malignant melanoma, AIDS-related Kaposi's sarcoma, and follicular non-Hodgkin's lymphoma; it also is used in the treatment of chronic myelogenous leukemia (CML), renal cell carcinoma, neuroendocrine tumors, multiple myeloma, non-follicular non-Hodgkin's lymphoma, desmoid tumors, and cutaneous T-cell lymphoma, although use is limited due to systemic immunotoxicity (see, e.g., Ivashkiv and Donlin (2014) Nat. Rev. Immunol. 14(1):36-49; Kalliolias and Ivashkiv (2010) Arthritis Research & Therapy 12(Suppl 1):S1; and Lee, S. and Margolin, K. (2011) Cancers 3:3856-3893).

[0873] Expression of type I interferons in tumors and the tumor microenvironment is among the immune responses that the immunostimulatory bacteria herein are designed to evoke. Inducing or evoking type I interferon provides anti-tumor immunity for the treatment of cancer.

[0874] a. Constitutive STING Expression and Gain-of-Function Mutations

[0875] The induction of type I IFNs, proinflammatory cytokines and chemokines is necessary for mounting an immune response that prevents or inhibits infection by viral pathogens. This response also can be effective as an anti-tumor agent. The immunostimulatory bacteria provided herein encode proteins that constitutively induce type I IFNs. Among these proteins are those that occur in individuals with various diseases or disorders that involve the over-production of immune response modulators. For example, over-production or excessive production, or defective negative regulation of type I IFNs and pro-inflammatory cytokines, can lead to undesirable effects, such as inflammatory and autoimmune diseases. Disorders involving the overproduction, generally chronic, of type I IFNs, are referred to as interferonopathies (see, e.g., Lu and MacDougall (2017) Front. Genet. 8:118; and Konno et al. (2018) Cell Reports 23:1112-1123). Disorders and clinical phenotypes associated with type I interferonopathies include Aicardi-Goutiéres syndrome (AGS), STING-associated vasculopathy with onset in infancy (SAVI), Singleton-Merten syndrome (SMS), atypical SMS, familial chilblain lupus (FCL), systemic lupus erythematosus (SLE), bilateral striatal necrosis (BSN), cerebrovascular disease (CVD), dyschromatosis symmetrica hereditaria (DSH), spastic paraparesis (SP), X-linked reticulate pigmentary disorder (XLPDR), proteasome-associated auto-inflammatory syndrome (PRAAS), intracranial calcification (ICC), Mendelian susceptibility to mycobacterial disease (MSMD), and spondyloenchondrodysplasia (SPENCD) (see, e.g., Rodero et al. (2016) J. Exp. Med. 213(12):2527-2538). These phenotypes are associated with particular genotypes, involving mutations in genes that lead to constitutive activities of products involved in the induction of type I IFNs.

[0876] The sustained activation of interferon signaling can be due to: 1) loss-of-function mutations leading to increased cytosolic DNA (e.g., mutations in TREX1 and SAMHD1), or increased cytosolic RNA/DNA hybrids (e.g., mutations in RNASEH2A, RNASEH2B, RNASEH2C, and POLA1); 2) loss-of-function mutations resulting in a defect in RNA editing and abnormal sensing of self-nucleic acid RNA species in the cytosol (e.g., mutations in ADAR1); 3) gain-of-function mutations leading to constitutive activation of cytosolic IFN signaling pathways/increased sensitivity to cytosolic nucleic acid ligands (e.g., mutations in RIG-I, MDA5 and STING); 4) loss-of-function mutations leading to aberrant RNA signaling via MAVS caused by a disturbance of the unfolded protein response (e.g., mutations in SKIV2L); 5) loss-of-function mutations in molecules responsible for limiting IFN receptor (IFNAR1/2) signaling, leading to uncontrolled IFN-stimulated gene (ISG) production (e.g., mutations in USP18 and ISG15); 6) proteasomal dysfunction, leading to increased IFN signaling through an unknown mechanism (e.g., mutations in PSMA3, PSMB4 and PSMB8); and 7) loss-of-function mutations in TRAP/ACP5 and C1q, where the mechanisms leading to type I IFN signaling remain unclear (see, e.g., Rodero et al. (2016) J. Exp. Med. 213(12):2527-2538).

[0877] Of interest herein are mutations that lead to gain-of-function (GOF). There are known mutations in STING, MDA5 and RIG-I, that are associated with constitutive activation of the encoded proteins, and/or enhanced sensitivity or increased affinity or binding to endogenous ligands. GOF mutations in STING, for example, are linked to SAVI and FCL; GOF mutations in MDA5 are linked to AGS and SMS; and GOF mutations in RIG-I are linked to atypical SMS.

[0878] TMEM173 STING Alleles

[0879] Stimulator of interferon genes (STING) is encoded by the transmembrane protein 173 (TMEM173) gene, which is a ˜7 kb-long gene. The human TMEM173 gene is characterized by significant heterogeneity and population stratification of alleles. The most common human TMEM173 allele is referred to as R232 (referencing the amino acid present at residue 232; see, e.g., SEQ ID NOs:305-309, setting forth the sequences of various human TMEM173 alleles). More than half the American population is not R232/R232. The second most common allele is R71H-G230A-R293Q (HAQ). Other common alleles include AQ (G230A-R293Q), Q (Q293) and R232H (named REF after the reference STING allele first identified and catalogued in the database by Glen Barber).

[0880] R232/R232 is the most common genotype in Europeans, while HAQ R232 is the most common genotype in East Asians. Africans have no HAQ/HAQ genotypes, but have the Q allele, and ˜4% of Africans are AQ/AQ, which is absent in other ethnic populations (see, e.g., Patel and Jin (2018) Genes & Immunity, doi:10.1038/s41435-018-0029-9). The REF, AQ and Q alleles are highly refractory to bacterially-derived CDNs, such as 3′3′ c-di-GMP (see, e.g., Corrales et al. (2015) Cell Reports 11:1018-1030).

[0881] STING Gain-of-Function Mutations

[0882] Several activating or gain-of-function (GOF) mutations in TMEM173, the gene for STING, inherited and de novo, have been linked to the rare auto-inflammatory disease SAVI (STING-associated vasculopathy with onset in infancy). SAVI is an autosomal dominant disease and is characterized by systemic inflammation, interstitial lung disease, cutaneous vasculitis, and recurrent bacterial infection. SAVI with de novo TMEM173 mutations typically is characterized by an early-onset (<8 weeks) and severe phenotype, while familial mutations result in late-onset (teens to adults) and milder clinical symptoms. Inherited TMEM173 activating mutations include G166E and V155M, whereas de novo mutations include N154S, V155M, V147M, V147L, C206Y, R284G, R281Q, and S102P/F279L (see, e.g., Patel and Jin (2019) Genes & Immunity 20:82-89). Other activating TMEM173 mutations that have been identified include R284M, R284K, R284T, E316Q, and R375A (see, e.g., U.S. Application Publication No. 2018/0311343). Another gain-of-function mutation in TMEM173 is R284S, which results in a highly constitutively active STING, and was found to trigger innate immune signaling in the absence of activating CDNs, leading to chronic production of pro-inflammatory cytokines (see, e.g., Konno et al. (2018) Cell Reports 23:1112-1123).

[0883] TMEM173 mutations, such as N154S, V155M and V147L, and/or any of the mutations listed in the table below, singly or in any combination, with these and any other such mutations, such as N154S/R284G, result in a gain-of-function STING that is constitutively active and does not require, or is hypersensitive to, ligand stimulation, leading to chronic activation of the STING-interferon pathway. This has been demonstrated (see, e.g., Liu et al. (2014)N. Engl. J. Med. 371:507-518). Constructs of mutated TMEM173 (with each of the replacements V147L, N154S, V155M, and the loss-of-function mutant V155R), and non-mutated TMEM173, were transfected into STING-negative HEK293T cells, and stimulated with the STING ligand, cGAMP. Cells transfected with the N154S, V155M and V147L mutants exhibited highly elevated IFNB1 (the gene encoding IFN-β) reporter activity, which was not significantly boosted by stimulation with the STING ligand cGAMP. Cells that were transfected with the loss-of-function mutant (V155R), non-mutated TMEM173, or control plasmid, had no significant baseline activation. Stimulation with cGAMP resulted in a response in a dose-dependent manner in cells with non-mutated TMEM173, and resulted in a minimal response only at the highest cGAMP concentration, in cells expressing the loss-of-function mutant (see, e.g., Liu et al. (2014) N. Engl. J. Med. 371:507-518). These results show that the activating TMEM173 mutations result in constitutive activation of STING, even in the absence of stimulation by cGAMP.

[0884] G207E is another gain-of-function STING mutation that causes alopecia, photosensitivity, thyroid dysfunction, and SAVI-features. The G207E mutation causes constitutive activation of inflammation-related pathways in HEK cells, as well as aberrant interferon signature and inflammasome activation in patient peripheral blood mononuclear cells (PBMCs). Using STING variants with the R232 or H232 allele and the GOF mutation G207E, it was shown that after stimulation with CDN, the R232+G207E variant resulted in slight increases of activity in the IFN-β and STAT1/2 pathways, while with the H232+G207E variant, IFN-β levels remained constant, and STAT1/2 showed diminished activity. Both variants showed similar STAT3 and NF-κB pathway activation following stimulation. These results show that the residue R at position 232 is important for cGAMP binding and IFN induction, and show that G207E mutants result in constitutive activation of STING signaling pathways and ligand-dependent hyperactivation of the NF-κB pathway. Patients with the R232 allele and the G207E mutation had more severe disease; this polymorphism strengthens the constitutive activation of the mutant STING, leading to the overexpression of downstream targets, such as IFN, IL1-β, and IL-18 (see, e.g., Keskitalo et al. (2018), available from: doi.org/10.1101/394353).

[0885] 67 amino acids in murine STING (SEQ ID NO:369) were mutated (see, Burdette et al. (2011) Nature 478(7370):515-518), either individually or in groups, to identify amino acids involved in cyclic di-GMP (c-di-GMP) binding and/or IFN induction. Among the mutants identified were hyperactive mutants R196A/D204A, S271A/Q272A, R309A/E315A, E315A, E315N, E315Q, and S271A (corresponding to R197A/D205A, S272A/Q273A, R310A/E316A, E316A, E316N, E316Q, and S272A, respectively, with reference to the sequence of human STING as set forth in SEQ ID NOs:305-309), that spontaneously induced IFN at low levels of transfection and did not respond to c-di-GMP, and the mutants R374A, R292A/T293A/E295A/E299A, D230A, R231A, K235A, Q272A, S357A/E359A/S365A, D230A/R231A/K235A/R237A, and R237A (corresponding to R375A, R293A/T294A/E296A (there is no equivalent to E299 in human STING), D231A, R232A, K236A, Q273A, S358A/E360A/S366A, D231A/R232A/K236A/R238A, and R238A, respectively, with reference to human STING, as set forth in SEQ ID NOs:305-309), that induced IFN when overexpressed but did not respond to c-di-GMP. These alleles can still respond to the endogenous CDN 2′3′ c-di-GAMP, as it was later discovered that some human STING mutations have low affinity for the 3′3′ CDNs produced by bacteria, such as c-di-GMP (see, e.g., Corrales et al. (2015) Cell Reports 11:1018-1030).

[0886] The immunostimulatory bacteria provided herein that encode these proteins with gain-of-function mutations exploit the constitutive activation of these proteins to increase production of type I IFNs and pro-inflammatory cytokines. Tumor-targeting immunostimulatory bacteria are provided herein that encode STING, IRF3, IRF5, IRF7, MDA5, and/or RIG-I, with gain-of-function mutations. The immunostimulatory bacteria increase the production of type I IFN-mediated cytokines and chemokines in the tumor microenvironment, potentiating the anti-tumor immune response and improving the therapeutic efficacy of the immunostimulatory bacteria. The gene encoding STING is referred to as TMEM173, the gene encoding MDA5 is IFIH1, and the gene encoding RIG-I is DDX58. There are numerous alleles for each gene, and known mutations that can occur in genes with any of the alleles, resulting in gain-of-function or constitutive activation. The mutations listed below can occur singly, or can be used in any combination. Other mutations that result in gain-of-function can be identified by routine screening/mutation protocols. The table below lists exemplary gain-of-function mutations in each of STING/TMEM173 (SEQ ID NOs:305-309), MDA5/IFIH1 (SEQ ID NO:310), RIG-I/DDX58 (SEQ ID NO:311), IRF3 (SEQ ID NO:312), and IRF7 (SEQ ID NO:313). Other mutations, such as deletion of, or replacement of, a phosphorylation site or sites, such as 5324/L325/5326→S324A/L325/S326A in STING, and other replacements to eliminate a phosphorylation site to reduce nuclear factor-κB (NF-κB) signaling in STING, or other proteins that employ such signaling, also can be introduced.

[0887] The resulting proteins can be encoded in the immunostimulatory bacteria provided herein. The proteins are encoded on plasmids in the immunostimulatory bacteria.

[0888] Administering nucleic acids encoding wild-type STING can induce an immune response; the administration of gain-of-function STING mutants, with constitutive activity as provided herein, in tumor-targeted immunostimulatory bacteria, leads to a more potent immune response and more effective anti-cancer therapeutic. The enhanced immune response by the tumor-targeted administration of constitutively active STING, or other such modified DNA/RNA sensors, such as gain-of-function mutants of MDA5, RIG-I, IRF3, or IRF7, as provided herein, provides a therapeutically more effective anti-cancer treatment. For example, as described herein, modifying the immunostimulatory bacteria so that they do not infect epithelial cells, but retain the ability to infect phagocytic cells, including tumor-resident immune cells, effectively targets the immunostimulatory bacteria to the tumor microenvironment, improving therapeutic efficiency and preventing undesirable systemic immune responses. These tumor-targeted bacteria are engineered to encode gain-of-function STING, MDA5, RIG-I, IRF3, or IRF7 mutants, which are constitutively active, for example, even in the absence of ligand stimulation, providing a potent type I IFN response to improve the anti-cancer immune response in the tumor microenvironment.

[0889] Thus, for example, the administration of constitutively activated STING can provide an alternative means to boost STING signaling for the immunotherapeutic treatment of cancer. In certain embodiments, the tumor-targeting immunostimulatory bacteria provided herein can be modified to encode STING/TMEM173 (SEQ ID NOs: 305-309) with gain-of-function mutations, selected from S102P, V147L, V147M, N154S, V155M, G166E, R197A, D205A, R197A/D205A, C206Y, G207E, D231A, R232A, K236A, R238A, D231A/R232A/K236A/R238A, S272A, Q273A, S272A/Q273A, F279L, S102P/F279L, R281Q, R284G, R284S, R284M, R284K, R284T, R293A, T294A, E296A, R293A/T294A/E296A, R310A, E316A, E316N, E316Q, R310A/E316A, S324A/S326A, S358A, E360A, S366A, S358A/E360A/S366A, and R375A, as well as conservative mutations thereof. In addition, combinations of STING gain-of-function mutations, such as N154S/R284G, significantly increase STING signaling, compared to the single mutation counterparts. These mutations result in constitutive activity of STING.

Table of Exemplary Gain-Of-Function Mutants
Gain-of-Function Mutations Resulting in the Persistent Expression of Type IIFN

| STING | RIG-1 | MDA5 | IRF3 | IRI7 |
|---|---|---|---|---|
| V147L | E373A | T331I | S396D | S477D/S479D |
| N154S | C268F | T331R | S396D/S398D | S475D/S476D/S477D/ |
| | | | | S479D/S483D/S487D |
| V155M | | A489T | S396D/S398D/ | Δ247-467 |
| | | | S402D/T404D/ | |
| | | | S405D | |
| G166E | | R822Q | | S475D/S477D/S479D |
| C206Y | | G821S | | |
| G207E | | A452T | | |
| R281Q | | A946T | | |
| R284G | | R337G | | |
| R284S | | D393V | | |
| R284M | | G495R | | |
| R284K | | R720Q | | |
| R284T | | R779H | | |
| S102P | | R779C | | |
| F279L | | L372F | | |
| R197A | | | | |
| D205A | | | | |
| S102P/F279L | | | | |
| R197A/D205A | | | | |
| S272A/Q273A | | | | |
| R310A/E316A | | | | |
| R310A | | | | |
| E316A | | | | |
| E316N | | | | |
| E316Q | | | | |
| S272A | | | | |
| R375A | | | | |
| R293A | | | | |
| T294A | | | | |
| E296A | | | | |
| R293A/T294A/E296A | | | | |
| D231A | | | | |
| R232A | | | | |
| K236A | | | | |
| Q273A | | | | |
| S358A | | | | |
| E360A | | | | |
| S366A | | | | |
| S358A/E360A/S366A | | | | |
| D231A/R232A/K236A/R238A | | | | |
| R238A | | | | |
| V147M | | | | |
| S324A/S326A | | | | |
| N154S/R284G | | | | |

Amino acid residues R197, D205, R310, R293, T294, E296, S272, Q273, E316, D231, R232, K236, S358, E360, S366, and R238, with reference to the sequence of human STING, as set forth in any of SEQ ID NOs:305-309, correspond to amino acid residues R196, D204, R309, R292, T293, E295, S271, Q272, E315, D230, R231, K235, S357, E359, S365, and R237, respectively, of the murine STING, as set forth in SEQ ID NO:369. Also included are conservative substitutions of each of the replacements (see, e.g., the Table in the Definitions section, listing exemplary conservative mutations for each amino acid).

[0890] b. Constitutive IRF3 Expression and Gain-of-Function Mutations

[0891] IRF3 (interferon regulatory factor 3, or IRF-3) and IRF7 (or IRF-7) are key activators of type I IFN genes. Following virus-induced C-terminal phosphorylation (by TBK1), activated IRF3 and IRF7 form homodimers, translocate from the cytoplasm to the nucleus, and bind to IFN-stimulated response elements (ISREs) to induce type I IFN responses. IRF3 is expressed constitutively in unstimulated cells, and exists as an inactive cytoplasmic form, while IRF7 is not constitutively expressed in cells, and is induced by IFN, lipopolysaccharide and virus infection. Overexpression of IRF3 significantly increases the virus-mediated expression of type I IFN genes, resulting in the induction of an antiviral state. IRF3 activation also has been shown to up-regulate the transcription of the CC-chemokine RANTES (CCL5) following viral infection (see, e.g., Lin et al. (1999) Mol. Cell Biol. 19(4):2465-2474).

[0892] Residues S385, S386, S396, S398, S402, T404, and S405 in the C-terminal domain of IRF3 are phosphorylated after virus infection, inducing a conformational change that results in the activation of IRF3. IRF3 activation is induced, not only by viral infection, but also by lipopolysaccharide (LPS) and poly(I:C). Of the seven residues that can be phosphorylated in the C-terminal cluster of IRF3, a single point mutation, S396D, is sufficient for the generation of a constitutively active form of IRF3. IRF3(S396D) enhances the transactivation of IFNα1, IFN-β, and RANTES promoters by 13-, 14-, and 11-fold, respectively, compared to wild-type IRF3. Another mutant, IRF3(S396D/S398D), enhances the transactivation of IFNα1, IFN-β, and RANTES promoters by 13-, 12-, and 12-fold, respectively, compared to wild-type IRF3. Another constitutively active mutant of IRF3 is IRF3(5D), in which the serine or threonine residues at positions 396, 398, 402, 404, and 405 are replaced by phosphomimetic aspartic acid residues (IRF3(S396D/S398D/S402D/T404D/S405D)). Similar gain-of-function mutations, leading to constitutive activity of immune response mediators, such as induction of type I interferon, can be achieved by mutating serine residues to phosphomimetic aspartic acid in other proteins, such as RIG-I, MDA5 and STING, that are in immune response signaling pathways.

[0893] TRF3(5D) displays constitutive DNA binding and transactivation activities, dimer formation, association with the transcription coactivators p300 (also called EP300, or E1A binding protein p300)/CBP (also known as CREB-binding protein, or CREBBP), and nuclear localization. Its transactivation activity is not induced further by virus infection. IRF3(5D) is a very strong activator of IFN-β and ISG-15 gene expression; IRF3(5D) alone stimulates IFN-β expression as strongly as virus infection, and enhances transactivation of IFNα1, IFN-β, and RANTES promoters by 9-fold, 5.5-fold, and 8-fold, respectively, compared to wild-type IRF3 (see, e.g., Lin et al. (2000) J. Biol. Chem. 275(44):34320-34327; Lin et al. (1998) Mol. Cell Biol. 18(5):2986-2996; and Servant et al. (2003) J. Biol. Chem. 278(11):9441-9447). Any of positions S385, S386, S396, S398, S402, T404, and S405 can be mutated, alone or in combination, to produce constitutively active IRF3 mutants in the immunostimulatory bacteria provided herein.

[0894] c. Non-Human STING Proteins, and Variants Thereof with Increased or Constitutive Activity, and STING Chimeras, and Variants Thereof with Increased or Constitutive Activity

[0895] As discussed above, cytosolic double-stranded DNA (dsDNA) stimulates the production of type I interferon (IFN) through the endoplasmic reticulum (ER)-resident adaptor protein STING (stimulator of IFN genes), which activates the transcription factor interferon regulatory factor 3 (IRF3). The TANK binding kinase 1 (TBK1)/IRF3 axis results in the induction of type I IFNs, and the activation of dendritic cells (DCs) and cross-presentation of tumor antigens to activate CD8⁺ T cell-mediated anti-tumor immunity. STING signaling also activates the nuclear factor kappa-light-chain-enhancer of activated B cell (NF-κB) signaling axis, resulting in a pro-inflammatory response, but not in the activation of the DCs and CD8⁺ T-cells that are required for anti-tumor immunity.

[0896] Upon recognition of 2′3′-cGAMP, STING translocates from the endoplasmic reticulum through the Golgi apparatus, allowing the recruitment of TANK-binding kinase 1 (TBK1), and the activation of the transcription factors IRF3 and NF-κB. The carboxyl-terminal tail (C-terminal tail or CTT) region of STING is necessary and sufficient to activate TBK1 and stimulate the phosphorylation of IRF3; it also is involved in NF-κB signaling. The CTT is an unstructured stretch of approximately 40 amino acids that contains sequence motifs required for STING phosphorylation and recruitment of IRF3. IRF3 and NF-κB downstream signaling is attributed to specific sequence motifs within the C-terminal tail (CTT) of STING that are conserved among vertebrate species. Modular motifs in the CTT, which include IRF3-, TBK1-, and TRAF6-binding modules, control the strength and specificity of cell signaling and immune responses.

[0897] Depending on the species and the respective characteristics of their STING CTT discrete elements, the IRF3 and NF-κB downstream responses can be affected, and sometimes opposite. The STING CTT elements dictate and finely tune the balance between the two signaling pathways, resulting in different biological responses. In human and mouse immune cells, for example, STING-dependent IRF3 activation results predominantly in a type I interferon response. STING signaling in human cells also drives a pro-inflammatory response through canonical and possibly non-canonical NF-κB pathways via TRAF6 recruitment. Human STING residue S366 (see, e.g., SEQ ID NOs:305-309) is a primary TBK1 phosphorylation site that is part of an LxIS motif in the CTT, which is required for IRF3 binding, while a second PxPLR motif, including residue L374, is required for TBK1 binding. The LxIS and PxPLR motifs are highly conserved in all vertebrate STING alleles. In other species, STING signaling results predominantly in the activation of the NF-κB signaling axis. For example, the zebrafish CTT, which is responsible for hyperactivation of NF-κB signaling, contains an extension with a highly conserved PxExxD motif at the extreme C-terminus that is not present in human and other mammalian STING alleles; this motif shares similarity with tumor necrosis factor receptor-associated factor 6 (TRAF6) binding sites. While the role of TRAF6 in human STING signaling is non-essential, TRAF6 recruitment is essential for zebrafish STING-induced NF-κB activation. A human-zebrafish STING chimera, in which human STING was engineered to contain the zebrafish STING CTT module DPVETTDY, induced more than 100-fold activation of NF-κB activation, indicating that this region is necessary and sufficient to direct enhanced NF-κB signal activation. The addition of the zebrafish CTT also resulted in an increased STING interferon response (see, de Oliveira Mann et al. (2019) Cell Reports 27:1165-1175).

[0898] The differences among species in the balance between TRF3 and NF-κB signaling is exploited herein to produce modified STING proteins that have reduced NF-κB signaling, and/or optionally, increased IRF3 signaling, so that when the STING protein is delivered to and expressed in the TME, the resulting response is an increased anti-tumor/anti-viral response, compared to the unmodified STING protein.

[0899] In some embodiments, STING proteins from species that have low or no NF-κB signaling activity are provided in delivery vehicles, including any of the immunostimulatory bacteria described herein or known to those of skill in the art, as well as in other delivery vehicles, such as viral vectors, including oncolytic vectors, minicells, exosomes, liposomes, and in cells, such as T-cells that are used in cell therapy and used to deliver vehicles, such as bacteria and oncolytic vectors. The non-human STING proteins can be, but are not limited to, STING proteins from the following species: Tasmanian devil (Sarcophilus harrisii; SEQ ID NO:349), marmoset (Callithrix jacchus; SEQ ID NO:359), cattle (Bos taurus; SEQ ID NO:360), cat (Felis catus; SEQ ID NO:356), ostrich (Struthio camelus australis; SEQ ID NO:361), crested ibis (Nipponia nippon; SEQ ID NO:362), coelacanth (Latimeria chalumnae; SEQ ID NOs:363-364), boar (Sus scrofa; SEQ ID NO:365), bat (Rousettus aegyptiacus; SEQ ID NO:366), manatee (Trichechus manatus latirostris; SEQ ID NO:367), ghost shark (Callorhinchus milii; SEQ ID NO:368), and mouse (Mus musculus; SEQ ID NO:369). These vertebrate STING proteins readily activate immune signaling in human cells, indicating that the molecular mechanism of STING signaling is shared in vertebrates (see, de Oliveira Mann et al. (2019) Cell Reports 27:1165-1175).

[0900] In other embodiments, the non-human STING proteins contain any of the constitutive STING activation and gain-of-function mutations, at corresponding loci in the non-human STING corresponding to those in human STING, described above (see, Example 17 below, which provides exemplary alignments and corresponding mutations in various species; see, also, FIGS. 1-13).

[0901] In other embodiments, chimeras of STING proteins are provided. In the chimeras, the CTT region, or portion(s) thereof that confers or participates in NF-κB signaling/activity, of a first species STING protein is replaced with the corresponding CTT or portion(s) thereof from a second species, whose STING protein has lower or very little, less than human, NF-κB signaling activity. Generally, the first species is human, and the replacing CTT or portion(s) thereof is from the STING of a species such as Tasmanian devil, marmoset, cattle, cat, ostrich, boar, bat, manatee, crested ibis, coelacanth, and ghost shark, which have much lower NF-κB activity. This thereby results in a STING protein that induces type I interferon, which is important for anti-tumor activity, and that has limited or no NF-κB activity, which is not desirable in an anti-tumor therapy. The chimeras can further include the human constitutive STING activation and gain-of-function mutations in corresponding loci to increase or render type I interferon activity constitutive. In all embodiments, the TRAF6 binding motif can be deleted to further decrease or eliminate activity that is not desirable in an anti-tumor therapeutic. These non-human STING proteins, chimeras, and mutants are provided in delivery vehicles, such as any described herein or known to those of skill in the art, including oncolytic viral vectors, cells, such as stem cells and T-cells that are used in cell therapies, exosomes, minicells, liposomes, and the immunostimulatory bacteria provided herein, which accumulate in tumor-resident immune cells, and deliver encoded proteins to the tumor microenvironment and to tumors. The non-human STING proteins, modified STING proteins, and STING chimeras, are for use as therapeutics for the treatment of tumors as described herein, or for use in other methods known to those of skill in the art. Pharmaceutical compositions containing the STING proteins, delivery vehicles, and encoding nucleic acids also are provided.

[0902] d. Other Gene Products that Act as Cytosolic DNA/RNA Sensors and Constitutive Variants Thereof

[0903] Other gene products that sense or interact with cytosolic nucleic acids are the retinoic acid-inducible gene I (RIG-I)-like receptors (RLRs), which include RIG-I and MDA5 (melanoma differentiation-associated protein 5). RLRs are cytoplasmic sensors of viral dsRNA and nucleic acids secreted by bacteria, and include RIG-I, MDA5, and LGP2 (laboratory of genetics and physiology 2). Upon the binding of a ligand, such as a viral dsRNA, RIG-I and MDA5 activate the mitochondrial antiviral-signaling adaptor protein, or MAVS, which recruits tumor necrosis factor (TNF) receptor-associated factors (TRAFs), to assemble a signaling complex at the outer membranes of the mitochondria. Downstream signaling components further are recruited by TRAFs, resulting in the phosphorylation and activation of IRF3 (interferon regulatory factor 3), IRF7, NF-κB (nuclear factor kappa-light-chain-enhancer of activated B cells), and AP-1 (activator protein 1). As a result, the expression of IFNs, proinflammatory cytokines, and other genes involved in pathogen clearance, is induced (see, e.g., Lu and MacDougall (2017) Front. Genet. 8:118). Like STING, the constitutive activation of MDA5 and RIG-I due to gain-of-function mutations leads to the induction of type I IFNs, which can be leveraged to enhance the anti-tumor immune response in the immunostimulatory bacteria.

[0904] i. RIG-I

[0905] Retinoic acid-inducible gene I (RIG-I), also known as DDX58 (DEXD/H-box helicase 58), is another protein whose constitutive activation has been linked to the development of interferonopathies, such as atypical Smith-Magenis syndrome. RIG-I, like MDA5/IFIH1, is a member of the RIG-I-like receptor (RLR) family, and is a 925-residue cytosolic pattern recognition receptor that functions in the detection of viral dsRNA. RIG-I initiates an innate immune response to viral RNA through independent pathways that promote the expression of type I and type III IFNs and proinflammatory cytokines (see, e.g., Jang et al. (2015) Am. J. Hum. Genet. 96:266-274; and Lu and MacDougall (2017) Front. Genet. 8:118).

[0906] Atypical Smith-Magenis syndrome, without hallmark dental anomalies, but with variable phenotypes, including glaucoma, aortic calcification and skeletal abnormalities, has been found to be caused by mutations in the DEXD/H-box helicase 58 gene (DDX58), which encodes retinoic acid-inducible gene I (RIG-I). In particular, the mutations E373A and C268F in DDX58 were identified as causing gain-of-function in RIG-I. Elevated amounts of mutated DDX58 were associated with a significant increase in the basal levels of NF-κB reporter gene activity, and this activity was further increased by stimulation with the dsRNA analog poly(I:C). The RIG-I mutations also induced IRF3 phosphorylation and dimerization at the basal level, and led to increased expression of IFNB1, interferon-stimulated gene 15 (ISG15), and chemokine (C-C motif) ligand 5 (CCL5) in both basal, and poly(I:C) transfected HEK293FT cells. These results indicate that the mutated DDX58/RIG-I results in constitutive activation, leading to increased IFN activity and IFN-stimulated gene expression (see, e.g., Jang et al. (2015) Am. J. Hum. Genet. 96:266-274; and Lu and MacDougall (2017) Front. Genet. 8:118). Tumor-targeting immunostimulatory bacteria provided herein can be modified to encode RIG-I/DDX58 (see, e.g., SEQ ID NO:311) with gain-of-function mutations such as, but not limited to, E373A and C268F, singly, and in combination.

[0907] ii. MDA5/IFIH1

[0908] Another interferonopathy gene is the IFN-induced with helicase C domain-containing protein 1 (IFIH1), also known as melanoma differentiation-associated protein 5 (MDA5), which is a member of the RIG-I-like family of cytoplasmic DExD/H box RNA receptors. MDA5, encoded by IFIH1, is a 1,025 amino acid cytoplasmic pattern-recognition receptor that senses viral double-stranded RNA (dsRNA) and secreted bacterial nucleic acids in the cytoplasm, and activates type I IFN signaling through an adaptor molecule, MAVS (mitochondrial antiviral-signaling protein). MAVS recruits tumor necrosis factor (TNF) receptor-associated factors (TRAFs), which in turn recruit downstream signaling components, resulting in the phosphorylation and activation of IRF3 (interferon regulatory factor 3), IRF7, NF-κB (nuclear factor kappa-light-chain-enhancer of activated B cells), and AP-1 (activator protein 1). This results in the expression of IFNs, proinflammatory cytokines, and other genes involved in pathogen clearance (see, e.g., Rutsch et al. (2015) Am. J. Hum. Genet. 96:275-282; Rice et al. (2014) Nat. Genet. 46(5):503-509; and Lu and MacDougall (2017) Front. Genet. 8:118).

[0909] Gain-of-function (GOF) IFIH1 variants occur in subjects with autoimmune disorders, including Aicardi-Goutiéres syndrome (AGS) and Singleton-Merten syndrome (SMS), which are characterized by prominent vascular inflammation. AGS is an inflammatory disease particularly affecting the brain and skin, and is characterized by an upregulation of interferon-induced transcripts. AGS typically occurs due to mutations in any of the genes encoding DNA exonuclease TREX1, the three non-allelic components of the RNase H2 endonuclease complex, the deoxynucleoside triphosphate triphosphohydrolase SAMHD1, and the double-stranded RNA editing enzyme ADAR1. Some patients with AGS do not have mutations in any of these genes, but have GOF mutations in IFIH1, indicating that this gene also is implicated in AGS. Singleton-Merten syndrome is an autosomal-dominant disorder characterized by abnormalities in the blood vessels (e.g., calcification), teeth (e.g., early-onset periodontitis, root resorption), and bones (e.g., osteopenia, acro-osteolysis, osteoporosis). Interferon signature genes are upregulated in Singleton-Merten syndrome patients, which was linked to GOF mutations in IFIH1 (see, e.g., Rice et al. (2014) Nat. Genet. 46(5):503-509; and Rutsch et al. (2015) Am. J. Hum. Genet. 96:275-282).

[0910] The IFN-β reporter stimulatory activity of wild-type IFIH1, and six IFIH1 GOF mutants identified in AGS patients (R720Q, R779H, R337G, R779C, G495R, D393V), was compared in HEK293T cells, which express low levels of endogenous viral RNA receptors. Wild-type IFIH1 was induced upon binding of the long (>1 kb) dsRNA analog polyinosinic-polycytidylic acid (poly(I:C)), but not by a short 162 bp dsRNA, and had minimal activity in the absence of exogenous RNA. The IFIH1 mutants displayed a significant induction of IFN signaling in response to the short 162 bp dsRNA, in addition to robust signaling in response to poly(I:C). The mutants also displayed a 4-10 fold higher level of baseline signaling activity in the absence of exogenous ligand (Rice et al. (2014) Nat. Genet. 46(5):503-509).

[0911] Another gain-of-function IFIH1 mutation, R822Q, was identified as causing Singleton-Merten syndrome by triggering type I IFN production, and leading to early arterial calcification, as well as dental inflammation and resorption. HEK293T cells (which have the lowest endogenous IFIH1 expression levels) were used to overexpress wild-type and R822Q MDA5. Wild-type IFIH1 expression led to an increase in the expression of IFNB1 (interferon, beta 1, fibroblast) in a dose-dependent manner, whereas the mutated IFIH1 led to approximately 20-fold more IFNB1 expression. Following stimulation with the dsRNA analog poly(I:C), R822Q IFIH1 resulted in higher levels of IFNB1 expression than wild-type IFIH1, indicating that R822Q IFIH1 is hyperactive to non-self dsRNA. There was also higher expression of interferon signature genes, such as IFI27, IFI44L, IFIT1, ISG15, RSG15, RSAD2, and SIGLEC1 in whole-blood samples from Singleton-Merten syndrome patients, which was in agreement with the higher expression level of IFNB1 by R822Q IFIH1 (see, e.g., Rutsch et al. (2015) Am. J. Hum. Genet. 96:275-282).

[0912] The interferon signature observed in patients with another IFIH1 GOF mutation, A489T, is indicative of a type I interferonopathy; IFIH1 A489T is associated with increased interferon production and phenotypes resembling chilblain lupus, AGS, and SMS (see, e.g., Bursztejn et al. (2015) Br. J. Dermatol. 173(6):1505-1513). The A489T variant not only resulted in IFN induction following stimulation with the long dsRNA analog poly(I:C), but also with short dsRNA. Two additional gain-of-function mutations in IFIH1, T331I and T331R, were identified in patients with SMS phenotypes, who presented with a significant upregulation of IFN-induced transcripts. The T331I and T331R variants resulted in increased expression of IFN-β, even in the absence of exogenous dsRNA ligand, consistent with the observed constitutive activation of MDA5 (see, e.g., Lu and MacDougall (2017) Front. Genet. 8:118).

[0913] A946T is another IFIH1 GOF mutation that leads to the increased production of type I IFN, promoting inflammation and increasing the risk of autoimmunity. The A946T mutation in IFIH1 results in additive effects when combined with the TMEM173 R232 allele and the G207E GOF mutation in STING, leading to a severe early-onset phenotype with features similar to SAVI (see, e.g., Keskitalo et al. (2018) preprint, available from doi.org/10.1101/394353). G821S is a GOF mutation in IFIH1 which has been shown to lead to spontaneously developed lupus-like autoimmune symptoms in a mouse model (see, e.g., Rutsch et al. (2015) Am. J. Hum. Genet. 96:275-282), while the IFIH1 missense mutations A452T, R779H, and L372F, identified in individuals with AGS, were shown to cause type I interferon overproduction (see, e.g., Oda et al. (2014) Am. J. Hum. Genet. 95:121-125).

[0914] The tumor-targeting immunostimulatory bacteria provided herein can be modified to encode MDA5/IFIH1 (see, e.g., SEQ ID NO:310) with gain-of-function mutations selected from T331I, T331R, R337G, L372F, D393V, A452T, A489T, G495R, R720Q, R779H, R779C, G821S, R822Q, and A946T, singly, or in any combination.

[0915] iii. IRF7

[0916] Constitutively active forms of IRF7 (or IRF-7) include mutants in which different C-terminal serines are substituted by phosphomimetic Asp, including IRF7(S477D/S479D), IRF7(S475D/S477D/S479D), and IRF7(S475D/S476D/S477D/S479D/S483D/S487D). IRF7(S477D/S479D) is a strong transactivator for IFNA and RANTES gene expression, and stimulates gene expression, even in the absence of virus infection. IRF7(S475D/S477D/S479D), and IRF7(S475D/S476D/S477D/S479D/S483D/S487D) do not further augment the transactivation activity of IRF7(S477D/S479D), but the transactivation activity of all three mutants is stimulated further by virus infection. The mutant IRF7(A247-467), which localizes to the nucleus in uninfected cells, is a very strong constitutive form of IRF7; it activates transcription more than 1500-fold higher than wild-type IRF7 in unstimulated and virus infected cells (see, e.g., Lin et al. (2000) J. Biol. Chem. 275(44):34320-34327). The immunostimulatory bacteria provided herein, can encode and express constitutively active IRF7 mutants, including those with replacements at residues 475-477, 479, 483, and 487, and those with amino acid deletions. The immunostimulatory bacteria encode these proteins on plasmids under the control of promoters and, any other desired regulatory signals recognized by mammalian hosts, including humans.

[0917] e. Other Type I IFN Regulatory Proteins

[0918] Other proteins involved in the recognition of DNA/RNA that activate type I IFN responses can be mutated to generate constitutive type I IFN expression. The unmodified and/or modified proteins can be encoded in the immunostimulatory bacteria provided herein, to be used to deliver the protein to the tumor microenvironment, such as to tumor-resident immune cells, to increase expression of type I IFN.

[0919] These proteins include, but are not limited to, proteins designated TRIM56, RIP1, Sec5, TRAF2, TRAF3, TRAF6, STAT, LGP2, DDX3, DHX9 (DDX9), DDX1, DDX21, DHX15, DHX33, DHX36, DDX60, and SNRNP200.

| Gene | Encoded Protein | Activity/Function |
|---|---|---|
| TRIM56 | Tripartite motif- | Promotes dimerization of STING in response to |
| | containing protein 56/ E3 | dsDNA stimulation, resulting in production of IFN-β; |
| | ubiquitin-protein ligase | potentiates extracellular dsRNA-induced expression of |
| | TRIM56 | IFNB1 and IFN-stimulated genes ISG15, IFIT1/ISG56, |
| | | CXCL10, OASL and CCL5; positive regulator of |
| | | TLR3 signaling |
| RIP1/RIPK1 | Receptor-interacting | Transduces inflammatory and cell-death signals |
| | serine/threonine protein | (programmed necrosis) following death receptor |
| | (kinase) 1 | ligation, activation of pathogen recognition receptors |
| | | and DNA damage; indirectly activates NF-κB; directs |
| | | LPS-induced IFN-β synthesis in mice |
| Sec5 (EXOC2) | Exocyst complex | Component of exocyst complex, involved in docking of |
| | component 2 | exocytic vesicles with fusion sites on plasma |
| | | membrane; co-localizes with STING and TBK1 after |
| | | intracellular DNA stimulation, inducing type I IFN |
| | | production |
| TRAF2 | TNF receptor-associated | Regulates activation of NF-κB and JNK/MAPK8; |
| | factor 2 | mediates type I IFN induction |
| TRAF3 | TNF receptor-associated | Regulates activation of NF-κB and MAP kinases; |
| | factor 3 | mediates activation of IRF3; mediates type I IFN |
| | | induction; mediates cytokine production |
| TRAF6 | TNF receptor-associated | Activates NF-κB, JUN, and AP-1; induces type I IFN |
| | factor 6 | production in response to viral infection and |
| | | intracellular dsRNA; induces production of |
| | | proinflammatory cytokines |
| STAT1 | Signal transducer and | Forms part of ISGF3 transcription factor, which binds |
| | activator of transcription 1 | IFN stimulated response elements (ISREs) to activate |
| | | transcription of IFN-stimulated genes (ISGs) |
| LGP2 | Laboratory of genetics | Regulates RIG-I/DDX58- and IFIH1/MDA5-mediated |
| (DHX58) | and physiology 2/ | antiviral signaling |
| | Probable ATP-dependent | |
| | RNA helicase DHX58 | |
| DDX3 | ATP-dependent RNA | Promotes production of type I IFN; acts as viral RNA |
| (DDX3X) | helicase DDX3X | sensor; involved in TBK1 and IKBKE-dependent IRF3 |
| | | activation, leading to induction of IFNB; associates |
| | | with IFNB promoters; associates with MAVS and RIG- |
| | | I to induce signaling in early stages of infection; binds |
| | | MDA5 to enhance its recognition of dsRNA |
| DHX9/DDX9 | DExD/H-box helicase 9/ | Senses viral nucleic acids; triggers host responses to |
| | ATP-dependent RNA | non-self DNA in MyD88-dependent manner; interacts |
| | helicase A | with MAVS to stimulate NF-κB-mediated innate |
| | | immunity against virus infection and activate IRF3 and |
| | | MAPK pathways; potentiates virus-triggered induction |
| | | of IL-6 and IFN-β |
| DDX1 | ATP-dependent RNA | Component of a multi-helicase-TRIF complex that |
| | helicase DDX1 | senses viral double-stranded RNA (dsRNA), activates |
| | | the NF-κB signaling pathway, and induces production |
| | | of type I IFN and proinflammatory cytokines |
| DDX21 | Nucleolar RNA helicase 2 | Component of a multi-helicase-TRIF complex that |
| | | senses viral double-stranded RNA (dsRNA), activates |
| | | the NF-κB signaling pathway, and induces production |
| | | of type I IFN and proinflammatory cytokines |
| DHX15 | Pre-mRNA-splicing factor | Viral RNA sensor that interacts with MAVS to induce |
| (DDX15) | ATP-dependent RNA | type I IFN and proinflammatory cytokine production; |
| | helicase DHX15 | activates IRF3, NF-κB, and MAPK signaling |
| DHX33 | ATP-dependent RNA | Viral dsRNA sensor that interacts with MAVS and |
| (DDX33) | helicase DHX33 | triggers type I IFN response; activates NF-κB, IRF3, |
| | | and MAPK signaling pathways; activates NLRP3 |
| | | inflammasome, resulting in secretion of |
| | | proinflammatory cytokines |
| DHX36 | ATP-dependent | Component of a multi-helicase-TRIF complex that |
| (DDX36) | DNA/RNA helicase | senses viral double-stranded RNA (dsRNA), activates |
| | DHX36 | the NF-κB signaling pathway, and induces production |
| | | of type I IFN and proinflammatory cytokines |
| DDX60 | Probable ATP-dependent | Senses viral RNA and DNA; forms complex with RIG- |
| | RNA helicase DDX60 | I like receptors to promote antivirus activity; positively |
| | | regulates RIG-I and MDA5-dependent type I IFN and |
| | | IFN-inducible gene expression in response to viral |
| | | infection; binds ssRNA, dsRNA, and dsDNA; |
| | | promotes binding of RIG-I to dsRNA |
| SNRNP200 | U5 small nuclear | Senses/binds viral RNA and interacts with TBK1 to |
| | ribonucleoprotein 200 | promote IRF3 activation and type I IFN production |
| | kDa helicase | |

[0920] Gain-of-function variants can be produced, such as by screening and/or by mutagenesis. Site-directed mutagenesis can be performed in vitro to identify mutations with enhanced activity, that lead to higher level and/or constitutive type I IFN expression. Intact genomic DNA can be obtained from non-related patients experiencing auto-immune and auto-inflammatory symptoms, and from healthy individuals, to screen for and identify other products whose expression leads to increased or constitutive type I IFN expression. sequencing can be performed, and introns and exons can be analyzed, such that proteins with mutations in the pathways associated with the increased or constitutive expression of type I interferon are identified. After identification of mutations, cDNA molecules encoding the full-length gene, with and without the identified mutation(s), are transfected into a reporter cell line that measures expression of type I interferon. For example, a reporter cell line can be generated where the expression of luciferase is placed under the control of the promoter for IFN-β. A gain-of-function mutant that is constitutively active will promote the expression of IFN-β, whereas the unstimulated wild-type protein will not. Stimulation can be by virus infection, bacterial infection, bacterial nucleic acids, LPS, dsRNA, poly(I:C), or by increasing exogenous levels of the protein's ligand (e.g., CDNs). Identified proteins also include those that enhance an immune response to an antigen(s) of interest in a subject. The immune response comprises a cellular or humoral immune response characterized by one or more of: (i) stimulating type I interferon pathway signaling; (ii) stimulating NF-κB pathway signaling; (iii) stimulating an inflammatory response; (iv) stimulating cytokine production; (v) stimulating dendritic cell development, activity, or mobilization; (vi) any other responses indicative of a product whose expression enhances an immune response; and (vii) a combination of any of (i)-(vi).

[0921] 3. Antibodies and Antibody Fragments

[0922] Advances in antibody engineering have led to the creation of recombinant antibody fragments that have many improvements over conventional monoclonal antibodies, especially in terms of manufacturing, tissue penetration, and ease of use. An example of these is the single-chain fragment variable (scFv), consisting of the variable regions of the heavy (V_{H}) and light (V_{L}) chains of the antibody binding site, joined together by a flexible peptide linker that is generally the (G4S)₃ sequence (see, e.g., Weisser et al. (2009) Biotechnol. Adv. 27(4):502-520). Other examples include scFv-Fc antibody fragments, in which the V_{H} domain of the scFv is linked to an Fc region, as well as dimers and multimers and other combinations and forms of antibodies that are known to those of skill in the art. Antibody fragments and other constructs allow for targeting of antigens in a manner that can be encoded on a plasmid and delivered, as exemplified herein, by an immunostimulatory bacterium. Examples of antigens to target, include, tumor antigens, including those discussed in the Examples below, and other exemplary targets discussed below and elsewhere herein. Any target known to the skilled person is included, as are neo-antigens formed upon changes in conformation or structure.

[0923] a. TGF-β

[0924] Transforming growth factor beta (TGF-β) is a pleiotropic cytokine with numerous roles in embryogenesis, wound healing, angiogenesis, and immune regulation. It exists in three isoforms in mammalian cells, TGF-β1, TGF-β2, and TGF-β3; TGF-β1 is the most predominant in immune cells (see, e.g., Esebanmen et al. (2017) Immunol. Res. 65:987-994). TGF-β's role as an immunosuppressant is arguably its most dominant function. Its activation from a latent form in the tumor microenvironment, in particular, has profound immunosuppressive effects on DCs and their ability to tolerize antigen-specific T-cells. TGF-β also can directly convert Th1 CD4⁺ T-cells to immunosuppressive Tregs, further promoting tumor tolerance (see, e.g., Travis et al. (2014) Annu. Rev. Immunol. 32:51-82). Based on its tumor-specific immunosuppressive functions, and irrespective of its known cancer cell growth and metastasis-promoting properties, inhibition of TGF-β is a cancer therapy target. High levels of TGF-β signaling have been demonstrated in several human tumor types, including colorectal cancer (CRC), hepatocellular carcinoma (HCC), pancreatic ductal adenocarcinoma (PDAC), and non-small-cell lung cancer (NSCLC) (see, e.g., Colak et al. (2017) Trends Cancer 3(1):56-71). Systemic inhibition of TGF-β can lead to unacceptable autoimmune toxicities, and its inhibition should be localized to the tumor microenvironment. One way to accomplish this is to create a soluble TGF-β receptor that acts as a decoy for binding TGF-β (see, e.g., Zhang et al. (2008) J Immunol. 181:3690-3697). As such, a tumor-targeting immunostimulatory bacteria, containing a TGF-β receptor decoy, provided herein, can bind and remove TGF-β from the tumor microenvironment, thereby breaking tumor immune tolerance and stimulating anti-tumor immunity.

[0925] In addition to TGF-beta binding decoy receptors, other TGF-beta polypeptide antagonists, that can bind to and eliminate or reduce TGF-β in the tumor microenvironment, thereby breaking tumor immune tolerance and stimulating anti-tumor immunity, are included. Exemplary of such are anti-TGF-beta antibodies or antibody fragments, anti-TGF-beta receptor antibodies or antibody fragments, and soluble TGF-beta antagonist polypeptides.

[0926] Immunostimulatory bacteria are provided herein that accumulate in the tumor microenvironment, in tumors, and in particular, in tumor-resident immune cells, and that contain plasmids encoding TGF-beta polypeptide antagonists, including, for example, TGF-beta binding decoy receptors (TGF-β receptor decoys), anti-TGF-beta antibodies or antibody fragments, anti-TGF-beta receptor antibodies or antibody fragments, and soluble TGF-beta antagonist polypeptides. The antibody fragments can include any known in the art, or described herein, such as, but not limited to, scFvs and scFv-Fcs.

[0927] b. Bispecific scFvs and T-Cell Engagers

[0928] The use of scFvs has been improved by increasing the valency of binding to the target, often through the use of one or more scFv fragments (bis-specific, tri-specific, etc.), joined together by a long linker. Bi-specific T-cell engager (available under the trademark BiTE®) constructs are a class of artificial bispecific monoclonal antibodies that are utilized in cancer immunotherapy, and are formed by linking two single-chain variable fragments (scFvs), such that one scFv binds CD3 on the surface of cytotoxic T-cells, and the other binds a specific tumor-associated antigen (TAA). BiTEs® thus target T-cells to tumor cells, stimulating T-cell activation, cytokine production and tumor cell cytotoxicity independently of MHC class I or co-stimulatory molecules. Two examples of bi-specific T-cell engagers (BiTEs®) have been approved by the FDA, including catumaxomab (Removab®), which is directed against the tumor antigen EpCAM, and against CD3, and is used in the treatment of malignant ascites, and blinatumomab (BLINCYTO®), a BiTE® antibody directed against CD19 and CD3, which is used for the treatment of relapsed, refractory acute lymphoblastic leukemia (ALL; see, e.g., Ahamadi-Fesharaki et al. (2019) Mol. Ther. Oncolytics 14:38-56). Other bi-specific T-cell engagers (BiTEs®) target a variety of antigens, including, for example, carcinoembryonic antigen (CEA), prostate-specific membrane antigen (PSMA), EGFR, EphA2, HER2/neu, ADAM17/TACE, prostate stem cell antigen (PSCA), Delta-like ligand 3 (DDL3), and melanoma-associated chondroitin sulfate proteoglycan (MCSP). As exemplified herein, a BiTE® antibody also can be expressed from a plasmid following delivery by an immunostimulatory bacterium.

[0929] c. Anti-PD-1, Anti-PD-L1 and Anti-CTLA-4 Antibodies

[0930] i. Anti-PD-1/Anti-PD-L1 Antibodies

[0931] Programmed cell death protein 1 (PD-1) is an immune-inhibitory receptor that is involved in the negative regulation of immune responses. Its cognate ligand, programmed death-ligand 1 (PD-L1), is expressed on antigen-presenting cells (APCs), and upon binding to PD-1 on T-cells, leads to loss of CD8⁺ T-cell effector function, inducing T-cell tolerance. The expression of PD-L1 is often associated with tumor aggressiveness and reduced survival in certain human cancers (see, e.g., Gao et al. (2009) Clin. Cancer Res. 15(3):971-979).

[0932] Antibodies designed to block immune checkpoints, such as anti-PD-1 (for example, pembrolizumab, and nivolumab) and anti-PD-L1 (for example, atezolizumab, avelumab, and durvalumab) antibodies can prevent T-cell anergy and break immune tolerance. Only a fraction of treated patients, however, exhibit clinical benefit, and those that do, often present with autoimmune-related toxicities (see, e.g., Ribas (2015) N. Engl. J. Med. 373(16):1490-1492; and Topalian et al. (2012) N. Engl. J. Med. 366(26):2443-2454). Besides acquiring toxicity, anti-PD-1/anti-PD-L1 therapy often leads to resistance, and the concomitant use of anti-CTLA-4 antibodies (for example, ipilimumab) has shown limited success in clinical trials, with significantly additive toxicity. To limit the toxicity and enhance the potency of PD-1/PD-L1 blockade, an immunostimulatory bacterium, containing a plasmid encoding an antibody or antibody fragment, such as an scFv and scFv-Fc, and others known in the art and/or described herein, against PD-1 or against PD-L1, will synergize with activation of immune cells to potentiate anti-tumor immunity.

[0933] ii. Anti-CTLA-4 Antibodies

[0934] CTLA-4 (cytotoxic T-lymphocyte-associated protein 4), also known as CD152 (cluster of differentiation 152), is another immune-inhibitory receptor that functions as an immune checkpoint, and downregulates immune responses. CTLA-4 is constitutively expressed in regulatory T-cells (Tregs, or T_{regs}), and contributes to their inhibitory function, but is upregulated in conventional T-cells only after activation. CTLA-4 functions as an immune checkpoint by transmitting inhibitory signals to T-cells. CTLA-4 is homologous to the T-cell co-stimulatory protein, CD28, and both molecules bind to CD80 (also known as B7-1 or B7.1) and CD86 (also known as B7-2 or B7.2) ligands on antigen-presenting cells (APCs). The binding of CTLA-4 to the ligands transmits an inhibitory signal to T-cells, whereas the binding of CD28 transmits a stimulatory signal.

[0935] Following T-cell activation, CTLA-4 receptors are induced, which then outcompete CD28 receptors on T-cells, for binding to CD80 and CD86 ligands on the surfaces of APCs. CTLA-4 binds to CD80 and CD86 with greater affinity and avidity than CD28, thus enabling it to outcompete CD28 for its ligands, resulting in the transmittal of inhibitory signals to T-cells, and an immune inhibitory response. T-cell activation through the T-cell receptor and CD28 leads to increased expression of CTLA-4.

[0936] Optimal T-cell priming requires co-stimulatory signals resulting from the ligation of T-cell CD28 with CD80 and/or CD86. The blockade of CTLA-4 from binding to these ligands thus enhances T-cell priming, and allows for the induction of an anti-tumor immune response.

[0937] In some embodiments, the immunostimulatory bacterial strains provided herein contain plasmids encoding anti-CTLA-4 antibodies, including fragments thereof, such as, but not limited to, anti-CTLA-4 scFvs (see, e.g., copending PCT application International PCT Application No. PCT/US2020/060307 for sequences of exemplary human anti-CTLA-4 scFv and scFv-Fc fragments; see, also, Example 25).

[0938] d. Additional Exemplary Checkpoint Targets

[0939] Exemplary immune checkpoint targets for which an scFv, or any other recombinant antibody fragment against them can be prepared, or are exemplified herein include, but are not limited to, those listed in the table below:

Checkpoint target

CTLA-4
PD-L1 (B7-H1)
PD-L2
PD-1, PD-2
IDO1
IDO2
SIRP alpha (CD47)
VISTA (B7-H5)
LIGHT
HVEM
CD28
LAG3, TIM3, TIGIT
Galectin-9
CEACAM1, CD155, CD112, CD226, CD244 (2B4)
B7-H2, B7-H3, CD137, ICOS, GITR, B7-H4, B7-H6
CD137, CD27, CD40, CD40L, CD48, CD70, CD80,
CD86, CD137 (4-1BB), 4-1BBL, CD200, CD272
(BTLA), CD160
A2a receptor, A2b receptor, HHLA2, ILT-2, ILT-4,
gp49B, PIR-B
OX40, OX-40L, HLA-G, ILT-2/4
KIR, TIM1, TIM4
CLEVER-1/Stabilin-1

[0940] 4. Combinations of Immunomodulatory Proteins can have Synergistic Effects and/or Complementary Effects

[0941] Cytokines are powerful modulators of the anti-tumor immune response. Cytokine combinations are known to have profound synergistic effects on different immune compartments involving T-cells, NK cells, and myeloid cells (including dendritic cells and macrophages). Cytokines are known to play major roles in antigen priming by dendritic cells, survival and proliferation of innate immune cells and antigen-specific T-cells, and the cytotoxic activity of NK and T-cells. Cytokine combinations must be properly chosen to maximize biological responses and enhance anti-tumor immunity. For example, in a murine model of hepatitis, IFN-α alone was found to enhance the CD8⁺ T-cell cytolytic function of virally infected cells, while IL-15 alone enhanced the proliferation of activated lymphocytes. Together, they maximally suppressed hepatitis B (HBV) infection (see, e.g., Di Scala et al. (2016) J. Virol. 90(19):8563-8574). In another example, combinations of the cytokines IL-15+IL-18, and IL-15+IL-21, were able to enhance the production of IFN-γ from human NK and T-cells (see, e.g., Strengell et al. (2003) J. Immunol. 170(11):5464-5469). In another example, IL-2+IL-18 synergized to enhance IFN-γ production and increase the cytolytic function of CD4⁺ T-cells, CD8⁺ T cells, and NK lymphocytes (see, e.g., Son et al. (2001) Cancer Res. 61(3):884-888). Additionally, IL-12 and IL-18 were found to synergize to promote antigen-CD3 T-cell ligation-independent production of IFN-γ from human T-cells (see, e.g., Tominaga et al. (2000) Int. Immunol. 12(2):151-160). Combinations of cytokines are powerful enhancers of T-cell function, but the FDA-approved anti-cancer cytokines are too toxic to be dosed systemically and are thus rarely used, and combinations of systemically-administered cytokines only compound the toxicity (see, e.g., Conlon et al. (2019) J. Interferon Cytokine Res. 39(1):6-21).

[0942] The immunostimulatory bacteria provided herein solve these problems. Provided are immunostimulatory bacteria containing plasmids encoding multiple therapeutic products, such as immunomodulatory proteins, that allow for tumor-specific delivery of cytokine combinations and/or combinations with other therapeutic products, such as the inducers of type I interferon discussed herein, and others, including co-stimulatory molecules, chemokines, and antibodies and fragments thereof. These immunostimulatory bacteria achieve powerful and synergistic immuno-activation without the systemic toxicities and pharmacokinetic (PK) liabilities associated with direct IV administration of the cytokines and other therapeutic products.

[0943] Combinations of therapeutic products that can be encoded on the plasmids in the immunostimulatory bacteria provided herein include, but are not limited to, for example, two or more cytokines; one or more cytokines and an inducer of type I IFN (e.g., STING, IRF3, IRF7, MDA5, RIG-I, and constitutively active, GOF variants thereof), and/or a co-stimulatory molecule (e.g., 4-1BBL and 4-1BBLΔcyt); a TGF-β decoy receptor and one or more cytokines; a TGF-β decoy receptor and an inducer of type I IFN; a TGF-β decoy receptor, one or more cytokines, and/or an inducer of type I IFN, and/or a co-stimulatory molecule; an antibody (e.g., against an immune checkpoint, such as CTLA-4) and one or more cytokines; an antibody and an inducer of type I IFN; an antibody, one or more cytokines, and/or an inducer of type I IFN, and/or a co-stimulatory molecule; a co-stimulatory molecule agonist (e.g., a CD40 agonist) and one or more cytokines; a co-stimulatory molecule agonist and an inducer of type I IFN; and a co-stimulatory molecule agonist, one or more cytokines, and/or an inducer of type I IFN, and/or a co-stimulatory molecule.

[0944] As discussed below, the multiple therapeutic product expression cassettes can include single promoter constructs and/or dual/multiple promoter constructs, as well as post-transcriptional regulatory elements, and other regulatory elements, such as enhancers, polyadenylation signals, terminators, signal peptides, etc. The nucleic acid sequences can be codon optimized to increase protein expression, and generally, are under control of a eukaryotic promoter. Particular constructs and details thereof are described elsewhere herein.

[0945] Among the immunostimulatory bacteria provided herein are those that contain plasmids encoding immunostimulatory proteins (e.g., cytokines, chemokines, co-stimulatory molecules), and/or gene products with gain-of-function mutations that increase immune responses in the tumor microenvironment (e.g., cytosolic DNA/RNA sensors that induce type I IFN), and/or antibodies and fragments thereof, and/or other therapeutic products that enhance the anti-tumor response, such as TGF-β and/or IL-6 decoy receptors, and/or TGF-β antagonizing polypeptides. These immunostimulatory bacteria that encode the cytokines, gain-of-function products/type I IFN pathway proteins, and/or chemokines, and/or co-stimulatory molecules, and/or antibodies and fragments thereof, such as single-chain antibodies, and other therapeutic products discussed herein, include the immunostimulatory bacteria that preferentially infiltrate the tumor microenvironment, tumors, and tumor-resident immune cells. The immunostimulatory bacteria also include those in which the genome is modified so that they induce less cell death in tumor-resident immune cells, whereby the immunostimulatory bacteria accumulate in tumor-resident myeloid cells, to achieve high level ectopic expression of multiplexed genetic payloads in the target cells, and deliver the therapeutic products/immunomodulatory proteins to the tumor microenvironment (TME), to stimulate the immune response against the tumor. In particular, the immunostimulatory bacteria provided herein include up to about 8 or 8 modifications as described herein, including, but not limited to, adenosine auxotrophy, csgD⁻, pagP⁻, msbB⁻, flagellin⁻ (fliC⁻/fljB⁻), purI⁻, ansB⁻, asd⁻, and any other modifications described herein or known to improve targeting to, or accumulation in, the tumor microenvironment and/or tumor-resident myeloid cells, or to improve safety and tolerability (allowing for a higher dose), reduce the immunosuppressive cytokine profile, improve T-cell quality and function, limit replication in healthy tissues, eliminate biofilms, and improve the anti-tumor immune response, or to impart any of the desirable and advantageous properties discussed elsewhere herein.

[0946] The immunostimulatory bacteria further can encode other therapeutic products, such as a tumor antigen from the subject's tumor, to enhance the response against the particular tumor. Any of the immunostimulatory bacteria provided herein and described above and below can be modified to encode the therapeutic products, such as cytokines, chemokines, co-stimulatory molecules and gain-of-function type I IFN pathway product(s). The therapeutic products are encoded on a plasmid under control of a promoter recognized by the host, and any other desired regulatory sequences recognized in a eukaryotic, such as a human, or other animal, or mammalian, subject. Generally, the nucleic acid encoding the product is under the control of an RNA polymerase II promoter. Additionally, any of the bacteria described herein for modification, such as any of the strains of Salmonella, Shigella, E. coli, Bifidobacteriae, Rickettsia, Vibrio, Listeria, Klebsiella, Bordetella, Neisseria, Aeromonas, Francisella, Cholera, Corynebacterium, Citrobacter, Chlamydia, Haemophilus, Brucella, Mycobacterium, Mycoplasma, Legionella, Rhodococcus, Pseudomonas, Helicobacter, Bacillus, and Erysipelothrix, or an attenuated strain thereof, or a modified strain thereof, can be modified by introducing a plasmid containing, or by encoding on a plasmid in the bacteria, nucleic acid encoding the therapeutic product(s) under control of an RNA polymerase promoter recognized by the host. The therapeutic products are expressed in the infected subject's cells. The immunostimulatory bacteria include those that are modified, as described herein, to accumulate in, or to preferentially infect, tumors, the TME and/or tumor-resident myeloid cells. For example, immunostimulatory bacteria that encode gain-of-function products leading to the expression of, or the constitutive expression of, type I interferon (IFN), such as IFN-beta, and/or other therapeutic products as discussed herein, further are modified to have reduced ability or no ability to infect epithelial cells, but are able to infect phagocytic cells, including tumor-resident immune cells, and/or the immunostimulatory bacteria are modified so that they do not kill the infected phagocytic cells.

[0947] As described herein, genes involved in the SPI-1 pathway, and flagella, activate the inflammasome in phagocytic cells (immune cells), triggering pyroptosis. Knocking out SPI-1 genes and genes that encode flagella, decreases or eliminates pyroptosis of phagocytic cells, and also, eliminates infection of epithelial cells, resulting in increased infection of phagocytic cells. Provided are immunostimulatory bacteria that accumulate in phagocytic cells, particularly tumor-resident immune cells, such as, for example, myeloid-derived suppresser cells (MDSCs), tumor-associated macrophages (TAMs), and dendritic cells (DCs), in which they express the genetic payloads/therapeutic products encoded on plasmids that are controlled by eukaryotic promoters, such as those recognized by RNA polymerase II, and include other eukaryotic regulatory signals, as discussed herein. Expressed therapeutic products include those that evoke immune responses, such as through pathways that increase or induce type I interferons, which increase the host response in the tumor microenvironment. The immunostimulatory bacteria also can encode immunostimulatory proteins, such as IL-2 and/or other cytokines, and/or other immunostimulatory proteins and therapeutic products, as discussed herein, further enhancing the immune response in the tumor microenvironment.

[0948] The immunostimulatory bacteria can encode products, referred to as cytosolic DNA/RNA sensors, that evoke immune responses when exposed to nucleic acids, such as RNA, DNA, nucleotides, dinucleotides, cyclic nucleotides, cyclic dinucleotides, and other such molecules, in the cytosol of cells. The immunostimulatory bacteria herein, encode modified therapeutic products that constitutively evoke immune responses, and do not require the presence of the DNA/RNA in the cytosol. Exemplary of such are components of pathways that induce type I interferon expression. The therapeutic products contemplated herein include modified forms of these cytosolic DNA/RNA sensors, that have constitutive activity or increased activity (i.e., gain-of-function products), such that type I interferon(s) is/are expressed or produced in the absence of nucleotides, dinucleotides, cyclic nucleotides, cyclic dinucleotides, and other such ligands, in the cytosol of cells. Expression of these modified products in cells, particularly in tumor cells, including tumor-resident immune cells, leads to constitutive expression of type I interferons, including interferon-β, in the tumor microenvironment. Because the immunostimulatory bacteria that express these gain-of-function products accumulate in or preferentially infect tumor cells/the TME/tumor-resident immune cells, the therapeutic products are expressed in the tumor microenvironment, resulting in increased immune responses in the tumor microenvironment.

[0949] Exemplary gene products that can be encoded in the immunostimulatory bacteria and other vehicles, include, but are not limited to, proteins that sense or are involved in innate pathways that recognize cytosolic DNA/RNA and activate type I interferon production. Proteins involved in innate DNA/RNA recognition that activate type I interferon include, but are not limited to: STING, RIG-I, MDA5, IRF3, IRF7, TRIM56, RIP1/RIPK1, Sec5/EXOC2, TRAF2, TRAF3, TRAF6, STAT1, LGP2/DHX58, DDX3/DDX3X, DHX9/DDX9, DDX1, DDX21, DHX15/DDX15, DHX33/DDX33, DHX36/DDX36, DDX60, and SNRNP200. Gain-of-function mutations in any of these proteins that result in constitutive type I interferon expression are known, or can be identified, and the mutants can be delivered by the immunostimulatory bacteria to the tumor microenvironment, such as by infection of phagocytic cells, or by targeting and binding to tumor cells.

[0950] The gain-of-function mutations include those identified from individuals with disorders resulting from constitutive type I interferon expression. Exemplary of gain-of-function products are those that occur in subjects with interferonopathies. As noted above, mutations can be identified by screening, to generate gain-of-function products as well.

[0951] The nucleic acids encoding the therapeutic products further can be modified to improve properties for expression. Modifications include, for example, codon optimization to increase transcriptional efficiency in a mammalian, particularly human, subject, such as reduction of GC content or CpG dinucleotide content, removal of cryptic splicing sites, adding or removing (generally removing) CpG islands, replacement of the Shine-Dalgarno (SD) sequence, and replacement of TATA box and/or terminal signals to increase transcriptional efficiency. Codons can be optimized for increasing translation efficiency by altering codon usage bias, decreasing GC content, decreasing mRNA secondary structure, removing premature poly(A) sites, removing RNA instability motifs (ARE), reducing stable free energy of mRNA, modifying internal chi sites and ribosomal binding sites, and reducing RNA secondary structures. Additional modifications to improve expression, and to maintain or enhance bacterial fitness have been incorporated into the immunostimulatory bacteria. These are described in sections below, and detailed and exemplified in the working Examples below.

[0952] As described above, type I interferon induction pathways, mediated by host recognition of cytosolic nucleic acids, such as single-stranded and double-stranded RNA, cyclic di-nucleotides (CDNs), and other such forms of nucleic acids, induce type I IFN. There also are Toll-Like Receptor (TLR)-independent type I IFN pathways, mediated by host recognition of single-stranded (ss) and double-stranded (ds) RNA in the cytosol. These are sensed by RNA helicases, including retinoic acid-inducible gene I (RIG-I), melanoma differentiation-associated gene 5 (MDA5), and through IFN-β promoter stimulator 1 (IPS-1) adaptor protein-mediated phosphorylation of the IRF3 transcription factor, leading to induction of IFN-β (see, e.g., Ireton and Gale (2011) Viruses 3(6):906-919). As discussed herein, proteins in these pathways can be modified, or can exist as variants, that result in constitutive expression of type I interferons (also referred to as interferon type 1), which include IFN-α and IFN-β. Exemplary of such proteins are the modified STING proteins described, including those provided, herein. These include modified STING proteins with mutations that result in constitutive expression of the type I interferons so that the interferons are expressed in the absence of induction, including modified non-human STING proteins and human STING proteins, and also, chimeric STING proteins, such as those in which the a C-terminal tail (CTT) portion is replaced with a CTT portion from a STING protein from a second species, wherein the STING protein of the second species has lower NF-κB signaling activity than the NF-κB signaling activity of human STING, and the TRAF6 binding site in the CTT optionally is deleted, and chimeric STING proteins that further include one or more gain-of-function mutations.

[0953] Therapy with the immunostimulatory bacteria provided herein can be combined with any other anti-cancer therapy, including checkpoint inhibitor therapies and, as discussed above and elsewhere herein, other cancer treatments and chemotherapy.

[0954] 5. Molecules that Activate Prodrugs

[0955] The plasmids in the immunostimulatory bacteria provided herein can include nucleic acids that encode molecules, such as enzymes, that activate, such as by cleavage of a portion of, therapeutic products, such as prodrugs, including chemotherapeutic prodrugs, particularly toxins, that are activated by enzymatic cleavage. As a result, the inactive prodrug can be administered systemically, and is inactive. The plasmid-encoded activating molecule, such as an enzyme, is expressed in the tumor microenvironment after delivery of the immunostimulatory bacteria provided herein, so that the inactive prodrug is activated in the tumor microenvironment, where it exerts its anti-tumor effect. There are many examples of such prodrugs, including certain nucleosides, and toxin conjugates. Many such prodrugs and enzymes are known (see, e.g., Malekshah et al., (2016) Curr. Pharmacol. Rep. 2(6):299-308). These include prodrugs of 5-fluorouracil (5-FU), oxazaphosphorines, platinum drugs, and enzymes, such as deaminases, nitroreductases, phosphorylases, and cytochrome P450 enzymes, and many others.

[0956] 6. Immunostimulatory Bacteria that Deliver Combination Therapies

[0957] The immunostimulatory bacteria herein can be used to provide more than one therapeutic product, particularly those that are for anti-cancer therapy. In general, the products are complementary products to enhance and re-program the anti-tumor immune response. The immunostimulatory bacteria, by virtue of the genomic modifications described herein, particularly the combination of several or of all of asd⁻, flagellin⁻ (such as fliC⁻/fljB⁻), pagP⁻, csgD⁻, purI⁻, adenosine auxotrophy, msbB⁻, ansB⁻, and any other modifications described elsewhere herein or known to those of skill in the art, accumulate in the tumor microenvironment (TME) and infect tumor-resident immune cells (myeloid cells). The immunostimulatory bacteria contain plasmids, encoding complementary therapeutic products, under control of a promoter or promoters recognized by the host, and any other desired regulatory sequences recognized in a eukaryotic, such as a human, or other animal, or mammalian, subject, to effect expression of the encoded products, and, also, secretion of the products. The immunostimulatory bacteria accumulate in the TME, particularly in tumor-resident immune cells, including myeloid-derived suppressor cells (MDSCs), tumor-associated macrophages (TAMs), and dendritic cells (DCs), where the encoded therapeutic products are expressed and then secreted into the tumor microenvironment to achieve an anti-tumor effect. By appropriate combination of products, the anti-tumor effect can be enhanced by virtue of interactions of the various products with the host immune system.

[0958] As discussed elsewhere herein, the immunostimulatory bacteria, containing plasmids encoding therapeutic products, with a single promoter and open reading frame (ORF), can express two (or more) proteins through the use of viral internal ribosomal entry sites (IRES), which are cap-independent, or through translational read-through of 2A peptides (e.g., T2A, P2A, E2A, or F2A), and subsequent self-cleavage into equally expressed co-proteins. Alternatively, the genetic payloads/therapeutic products can be expressed using dual or multiple promoter constructs, where each protein is expressed under the control of a separate promoter. A combination of single and dual/multiple promoter constructs, to express three or more proteins, also can be included on the plasmids. Generally, the nucleic acids encoding the therapeutic products are under the control of RNA polymerase II promoters. For example, promoters include, but are not limited to EF-1α, CMV, SV40, UBC, CBA, PGK, GUSB, GAPDH, EIF41A, CAG, CD68, and synthetic MND promoters. The plasmids can contain other regulatory elements, such as post-transcriptional regulatory elements (PREs; e.g., WPRE, HPRE), polyadenylation signal sequences, terminators, enhancers, secretion signals (also known as signal peptides/sequences, leader peptides/sequences), DNA nuclear targeting sequences (DTS), and other regulatory elements, described elsewhere herein or known to those of skill in the art that can enhance or increase the expression and/or secretion of the encoded therapeutic products.

[0959] The genetic payloads, or therapeutic products, encoded on the plasmids include immunostimulatory proteins, such as cytokines, chemokines, and co-stimulatory molecules; cytosolic DNA/RNA sensors that induce type I IFN and gain-of-function/constitutively active mutants/variants thereof; antibodies and fragments thereof; bi-specific T-cell engagers (BiTEs®); soluble TGF-β receptors that act as decoys for binding TGF-β, or TGF-β antagonizing polypeptides; IL-6 binding decoy receptors; interfering RNAs (e.g., siRNA, shRNA, miRNA); and other therapeutic products as discussed below and elsewhere herein, and as known in the art; and complementary combinations of all of the preceding therapeutic products. In some embodiments, the cytokines can be encoded on the plasmid within the immunostimulatory bacteria, with a membrane anchoring motif, such as a transmembrane domain, and a collagen-binding domain.

[0960] The immunostimulatory proteins, including cytokines, chemokines, and co-stimulatory molecules, that can be encoded on the plasmids include, but are not limited to, IL-2, IL-7, IL-12p70 (IL-12p40+IL-12p35), IL-15, IL-15/IL-15Rα chain complex, IL-18, IL-21, IL-23, IL-36 gamma, interferon-α, interferon-β, IL-2 that has attenuated binding to IL-2Ra, IL-2 that is modified so that it does not bind to IL-2Ra, CXCL9, CXCL10, CXCL11, CCL3, CCL4, CCL5, proteins that are involved in or that effect or potentiate the recruitment and/or persistence of T-cells, CD40, CD40 ligand (CD40L), OX40, OX40 ligand (OX40L), 4-1BB, 4-1BB Ligand (4-1BBL), 4-1BBL with a deletion in the cytoplasmic domain (4-1BBLΔcyt), ICOS, CD27, members of the B7-CD28 family, and members of the tumor necrosis factor receptor (TNFR) superfamily. The immunostimulatory proteins also include truncated co-stimulatory molecules, such as, for example, 4-1BBL, CD80, CD86, CD27L, B7RP1 and OX40L, with a cytoplasmic domain deletion, for expression on an antigen-presenting cell (APC), where the truncated gene product is capable of constitutive immunostimulatory signaling to a T-cell through co-stimulatory receptor engagement, and is unable to counter-regulatory signal to the APC due to a deleted cytoplasmic domain.

[0961] The cytosolic DNA/RNA sensors, that induce or activate type I IFN production include, but are not limited to, STING, RIG-I, MDA5, IRF3, IRF5, and IRF7, and gain-of-function (GOF) or constitutively active variants thereof. Other proteins involved in the recognition of DNA/RNA that activate type I IFN responses, that can be mutated to generate constitutive type I IFN expression and can be encoded on the plasmids, include, but are not limited to, TRIM/56, RIP1, Sec5, TRAF2, TRAF3, TRAF6, STAT1, LGP2, DDX3, DHX9, DDX1, DDX21, DHX15, DHX33, DHX36, DDX60, and SNRNP200.

[0962] Other therapeutic products that can be encoded on the plasmids delivered by the immunostimulatory bacteria herein, or that can be co-administered with the bacteria, that enhance or increase the anti-tumor response, include, but are not limited to, antibodies and fragments thereof, for example, TGF-β inhibitory antibodies; anti-IL-6 antibodies; antibodies against checkpoint inhibitors, such as PD-1, PD-L1, and CTLA-4; and antibodies against, or inhibitors of, VEGF, CD73, CD38, Siglec-15, EGFR, Her2, Mesothelin, and BCMA. Also contemplated for expression on the plasmid, or for co-administration with the immunostimulatory bacteria herein, are bispecific T-cell engagers (BiTEs®), IL-6 binding decoy receptors, TGF-beta binding decoy receptors, and TGF-beta polypeptide antagonists. Any of these antibodies, inhibitors or decoy receptors can be co-administered with the immunostimulatory bacteria herein. In some embodiments, PARP (poly (ADP)-ribose polymerase) inhibitors, histone deacetylase (HDAC) inhibitors, and/or chemotherapy, also can be co-administered with any of the therapeutic products listed above, alone, or in any combination.

[0963] Exemplary of complementary combinations of therapeutic products that can be encoded on the plasmids in the immunostimulatory bacteria herein include, but are not limited to:

[0964] IL-2 and IL-12p70; IL-2 and IL-21; IL-2, IL-12p70, and a STING GOF variant; IL-2, IL-21, and a STING GOF variant; IL-2, IL-12p70, a STING GOF variant, and 4-1BBL (including 4-1BBLΔcyt); and IL-2, IL-21, a STING GOF variant, and 4-1BBL (including 4-1BBLΔcyt);

[0965] IL-15/IL-15Rα and a STING GOF variant; IL-15/IL-15Rα, a STING GOF variant, and 4-1BBL (including 4-1BBLΔcyt); IL-15/IL-15Rα and IL-12p70; IL-15/IL-15Rα, and IL-21; IL-15/IL-15Rα, IL-12p70, and a STING GOF variant; IL-15/IL-15Rα, IL-21, and a STING GOF variant; IL-15/IL-15Rα, IL-12p70, a STING GOF variant, and 4-1BBL (including 4-1BBLΔcyt); and IL-15/IL-15Rα, IL-21, a STING GOF variant, and 4-1BBL (including 4-1BBLΔcyt);

[0966] IL-12p70 and IL-21; IL-12p70, IL-21 and a STING GOF variant; IL-12p70, IL-21, a STING GOF variant, and 4-1BBL (including 4-1BBLΔcyt); IL-12p70 and a STING GOF variant; IL-12p70, a STING GOF variant, and 4-1BBL (including 4-1BBLΔcyt); IL-12p70 and IL-18; IL-12p70, IL-18 and a STING GOF variant; and IL-12p70, IL-18, a STING GOF variant, and 4-1BBL (including 4-1BBLΔcyt);

[0967] a TGF-β decoy receptor, IL-2, and IL-12p70; a TGF-β decoy receptor, IL-2, and IL-21; a TGF-β decoy receptor, IL-2, IL-12p70, and a STING GOF variant; a TGF-β decoy receptor, IL-2, IL-21, and a STING GOF variant; a TGF-β decoy receptor, IL-2, IL-12p70, a STING GOF variant, and 4-1BBL (including 4-1BBLΔcyt); and a TGF-β decoy receptor, IL-2, IL-21, a STING GOF variant, and 4-1BBL (including 4-1BBLΔcyt);

[0968] a TGF-β decoy receptor, IL-15/IL-15Rα, and a STING GOF variant; a TGF-β decoy receptor, IL-15/IL-15Rα, a STING GOF variant, and 4-1BBL (including 4-1BBLΔcyt); a TGF-β decoy receptor, IL-15/IL-15Rα, and IL-12p70; a TGF-β decoy receptor, IL-15/IL-15Rα, and IL-21; a TGF-β decoy receptor, IL-15/IL-15Rα, IL-12p70, and a STING GOF variant; a TGF-β decoy receptor, IL-15/IL-15Rα, IL-21, and a STING GOF variant; a TGF-β decoy receptor, IL-15/IL-15Rα, IL-12p70, a STING GOF variant, and 4-1BBL (including 4-1BBLΔcyt); and a TGF-β decoy receptor, IL-15/IL-15Rα, IL-21, a STING GOF variant, and 4-1BBL (including 4-1BBLΔcyt);

[0969] a TGF-β decoy receptor, IL-12p70, and IL-21; a TGF-β decoy receptor, IL-12p70, IL-21, and a STING GOF variant; a TGF-β decoy receptor, IL-12p70, IL-21, a STING GOF variant, and 4-1BBL (including 4-1BBLΔcyt); a TGF-β decoy receptor and IL-12p70; a TGF-β decoy receptor, IL-12p70, and a STING GOF variant; a TGF-β decoy receptor, IL-12p70, a STING GOF variant, and 4-1BBL (including 4-1BBLΔcyt); a TGF-β decoy receptor, IL-12p70, and IL-18; a TGF-β decoy receptor, IL-12p70, IL-18, and a STING GOF variant; a TGF-β decoy receptor, IL-12p70, IL-18, a STING GOF variant, and 4-1BBL (including 4-1BBLΔcyt); and a TGF-β decoy receptor and a STING GOF variant;

[0970] an anti-CTLA-4 antibody, IL-2, and IL-12p70; an anti-CTLA-4 antibody, IL-2, and IL-21; an anti-CTLA-4 antibody, IL-2, IL-12p70, and a STING GOF variant; an anti-CTLA-4 antibody, IL-2, IL-21, and a STING GOF variant; an anti-CTLA-4 antibody, IL-2, IL-12p70, a STING GOF variant, and 4-1BBL (including 4-1BBLΔcyt); and an anti-CTLA-4 antibody, IL-2, IL-21, a STING GOF variant, and 4-1BBL (including 4-1BBLΔcyt);

[0971] an anti-CTLA-4 antibody, IL-15/IL-15Rα, and a STING GOF variant; an anti-CTLA-4 antibody, IL-15/IL-15Rα, a STING GOF variant, and 4-1BBL (including 4-1BBLΔcyt); an anti-CTLA-4 antibody, IL-15/IL-15Rα, and IL-12p70; an anti-CTLA-4 antibody, IL-15/IL-15Rα, and IL-21; an anti-CTLA-4 antibody, IL-15/IL-15Rα, IL-12p70, and a STING GOF variant; an anti-CTLA-4 antibody, IL-15/IL-15Rα, IL-21, and a STING GOF variant; an anti-CTLA-4 antibody, IL-15/IL-15Rα, IL-12p70, a STING GOF variant, and 4-1BBL (including 4-1BBLΔcyt); and an anti-CTLA-4 antibody, IL-15/IL-15Rα, IL-21, a STING GOF variant, and 4-1BBL (including 4-1BBLΔcyt);

[0972] an anti-CTLA-4 antibody, IL-12p70, and IL-21; an anti-CTLA-4 antibody, IL-12p70, IL-21, and a STING GOF variant; an anti-CTLA-4 antibody, IL-12p70, IL-21, a STING GOF variant, and 4-1BBL (including 4-1BBLΔcyt); an anti-CTLA-4 antibody and IL-12p70; an anti-CTLA-4 antibody, IL-12p70, and a STING GOF variant; an anti-CTLA-4 antibody, IL-12p70, a STING GOF variant, and 4-1BBL (including 4-1BBLΔcyt); an anti-CTLA-4 antibody, IL-12p70, and IL-18; an anti-CTLA-4 antibody, IL-12p70, IL-18, and a STING GOF variant; an anti-CTLA-4 antibody, IL-12p70, IL-18, a STING GOF variant, and 4-1BBL (including 4-1BBLΔcyt); and an anti-CTLA-4 antibody and a STING GOF variant;

[0973] a CD40 agonist, IL-2, and IL-12p70; a CD40 agonist, IL-2, and IL-21; a CD40 agonist, IL-2, IL-12p70, and a STING GOF variant; a CD40 agonist, IL-2, IL-21, and a STING GOF variant; a CD40 agonist, IL-2, IL-12p70, a STING GOF variant, and 4-1BBL (including 4-1BBLΔcyt); and a CD40 agonist, IL-2, IL-21, a STING GOF variant, and 4-1BBL (including 4-1BBLΔcyt);

[0974] a CD40 agonist, IL-15/IL-15Rα, and a STING GOF variant; a CD40 agonist, IL-15/IL-15Rα, a STING GOF variant, and 4-1BBL (including 4-1BBLΔcyt); a CD40 agonist, IL-15/IL-15Rα, and IL-12p70; a CD40 agonist, IL-15/IL-15Rα, and IL-21; a CD40 agonist, IL-15/IL-15Rα, IL-12p70, and a STING GOF variant; a CD40 agonist, IL-15/IL-15Rα, IL-21, and a STING GOF variant; a CD40 agonist, IL-15/IL-15Rα, IL-12p70, a STING GOF variant, and 4-1BBL (including 4-1BBLΔcyt); and a CD40 agonist, IL-15/IL-15Rα, IL-21, a STING GOF variant, and 4-1BBL (including 4-1BBLΔcyt); and

[0975] a CD40 agonist, IL-12p70, and IL-21; a CD40 agonist, IL-12p70, IL-21, and a STING GOF variant; a CD40 agonist, IL-12p70, IL-21, a STING GOF variant, and 4-1BBL (including 4-1BBLΔcyt); a CD40 agonist and IL-12p70; a CD40 agonist, IL-12p70, and a STING GOF variant; a CD40 agonist, IL-12p70, a STING GOF variant, and 4-1BBL (including 4-1BBLΔcyt); a CD40 agonist, IL-12p70, and IL-18; a CD40 agonist, IL-12p70, IL-18, and a STING GOF variant; a CD40 agonist, IL-12p70, IL-18, a STING GOF variant, and 4-1BBL (including 4-1BBLΔcyt); and a CD40 agonist and a STING GOF variant.

[0976] The following table lists exemplary products that can be encoded in plasmids in the immunostimulatory bacteria, and some effects/characteristics of such products, including synergistic effects of the combination of the IL-15 or IL-15 complex, discussed and demonstrated in the Examples.

| Encoded Product | Effects/Characteristics |
|---|---|
| Engineered | Chemokine gradients recruit T-cells. |
| STING - to | Induction of Type I IFN, T-cell activation. APC tumor antigen cross- |
| increase Type I | presentation. |
| IFN expression | Constitutive STING variants validated in SAVI patients with Type I |
| | Interferonopathies. |
| IL-12 | Strong Th1 immune response driver. |
| | Produced bv activated APCs, particularly M1 Macrophages and |
| | DCs* |
| | Data indicate that it is a strong driver of IFN-γ |
| IL-15 and/or IL-15 | Stimulates T-cell and NK cell proliferation. |
| complex (IL- | Lacks T_{reg} stimulation seen with IL-2. |
| 15Rα-IL-15sc) | |
| IL-21 | Pleiotropic cytokine that stimulates T-cells and NK cells. |
| | Converts M2 macrophages to M1 macrophages. |
| | Produced upon TLR3 activation (RNA viral sensing). |
| IL-36γ | Promotes Th1 APCs and IFN-γ production by T-cells. NK cells and |
| | γδT-cells. |
| Modified 4-1BBL | Provides T-cell co-stimulation, improves cytotoxicity and memory |
| | phenotype of T-cells; modified with deletion or truncation of the |
| | cytoplasmic domain, and addition of extra positive residues to the N- |
| | terminal truncated cytoplasmic domain. |
| Anti-CTLA-4 | Enhances T-cell priming and activation against weaker tumor |
| scFV-Fc | antigens. |
| TGF-β Decoy | Binds and removes TGF-beta, relieves immunosuppression of T- |
| Receptor Trap | cells and Th1 APCs. |

*DC = Dendritic Cells

[0977] In any of the complementary combinations above, a TGF-β decoy receptor can be replaced with a TGF-β antagonizing polypeptide. As discussed above, TGF-β decoy receptors are any that act as decoys for binding TGF-β to remove it, or are TGF-β antagonizing polypeptides (e.g., anti-TGF-beta antibodies or antibody fragments, and anti-TGF-beta receptor antibodies or antibody fragments). The STING protein or other DNA/RNA sensor that induces or activates type I IFN production, can be a GOF/constitutively active variant, or can be the wild-type protein, including the modified STING polypeptides and chimeric STING polypeptides described and provided herein. Any of the complementary combinations above also can be administered in combination with any one or more of: an anti-PD-1 antibody, an anti-CTLA-4 antibody, an anti-PD-L1 antibody, an anti-TL-6 antibody, an anti-Siglec-15 antibody, an anti-VEGF antibody, an anti-CD73 antibody, an anti-CD38 antibody, an anti-EGFR antibody, an anti-Her2 antibody, an anti-Mesothelin antibody, an anti-BCMA antibody, and antibody fragments thereof, as well as PARP inhibitors, HDAC inhibitors, or chemotherapy, and combinations thereof.

[0978] Plasmids and immunostimulatory bacteria provided herein encode combinations of therapeutic payloads. These include combinations of nucleic acid encoding any or all of the products listed in the table above. Combinations of complementary payloads were assessed, and exemplary combinations and their effects are described in the Examples. The effects of various combinations of payloads on the activation of antigen-specific T-cells, and on the secretion of CXCL10 by myeloid cells, a key chemokine involved in the recruitment of anti-tumor T-cells, were assessed. For example, combinations of the payloads can induce strong secretion of CXCL10 by bone marrow dendritic cells (BMDCs). Combining IL-367 with IL-12p70 and STING R284G tazCTT led to higher secretion of CXCL10 and IFN-7 by BMDCs. Many of the combinations induce the activation of CD8⁺ T-cell responses (e.g., 4-1BB expression), and the secretion of IFN-γ. Particular cytokine combinations can activate T-cells. For example, the combinations of IL-12p70+IL-15; IL-12p70+IL-15+IFN-α2; IL-12p70+IL-15+anti-4-1BB agonistic antibody; IL-12p70+IL-15+IL-367; IL-12p70+IL-15+IL-21; IL-12p70+IL-21+IL-367; IL-12p70+IL-367+IFN-α2; IL-12p70+IL-367+anti-4-1BB agonistic antibody; IL-15+IL-367+IFN-α2; and IL-15+IL-367+anti-4-1BB agonistic antibody, result in the secretion of high levels of IFN-γ, but relatively low levels of IL-6, from T-cells, making them ideal combinations for optimal T-cell activation, for the induction of anti-tumor immunity in the tumor microenvironment.

[0979] Additionally, several combinations of cytokines (IL-15/IL-15R alpha chain complex, IL-12, IL-12p70, IL-15, IL-21, and IL-367) and 4-1BB engagement, activate T-cells to secrete high levels of IFN-γ, with and without TCR stimulation by an anti-CD3F agonistic antibody, for CD4+ and CD8⁺ T-cells. STING variants described herein as well as IL-12 can increase antigen specific activation of human CD8⁺ T-cells. Data also showed, in a mouse (mu) model of colorectal carcinoma, that immunostimulatory bacterial strains, expressing IL-15, or the combination of 4-1BBLΔcyt+IL-12 more potently inhibit tumor growth inhibition that the same strains expressing 4-1BBL(Δcyt) or IL-12 alone, and result in a high complete response rate (50% cure rate). Other combinations also were tested and shown to have potent anti-tumor activity in vivo.

[0980] Combinations of payloads can include a co-stimulatory molecule, such as an OX40L polypeptide, or a 4-1BBL polypeptide, or one of the cytoplasmic deleted or truncated variants thereof, and/or the modified forms thereof described and exemplified herein; or an anti-immune checkpoint antibody or fragment thereof, such as an anti-CTLA-4 scFv-Fc or an anti-CTLA-4 scFv (see, Example 25 and SEQ ID NOs:428 and 429, respectively); one or more cytokines/chemokines, such as IL-12, IL-15, IL-18, IL-21, IL-23, IL-367, IFN-β, IFN-α2, and CXCL10; TGF-β binding decoy receptors and other TGF-beta polypeptide antagonists, such as, for example, a human soluble TGFβ receptor II fused with a human IgG1 Fc (hu sTGFβRII-Fc; SEQ ID NO:437), anti-TGF-beta antibodies or antibody fragments, anti-TGF-beta receptor antibodies or antibody fragments, and soluble TGF-beta antagonist polypeptides; and one or more of a STING protein or a modified and/or chimeric STING protein, as described and exemplified herein.

[0981] Payloads/products/polypeptides can be encoded as a polycistronic construct, under the control of a single promoter (i.e., a single promoter system) and, as required, other regulatory sequences, and also can include 2A polypeptides or other such polypeptides that result in the translation of individual products. The payloads also can be expressed on plasmids containing two separate open reading frames (ORFs), each under the control of a different promoter (i.e., a dual promoter system). Exemplary combinations of payloads, in the order they are encoded on a plasmid, and including the 2A peptide that is encoded in the polycistronic construct, are set forth in the following table. The table includes the 2A peptide, but other such peptides can be substitute and/or products can be separately encoded.

### Exemplary Combinations of Products and Exemplary Order on the Plasmids

| 1^{st} Encoded | 1^{st} 2A | 2^{nd} Encoded | 2^{nd} 2A | 3^{rd} Encoded | 3^{rd} 2A | 4^{th} Encoded |
|---|---|---|---|---|---|---|
| Product | Peptide | Product | Peptide | Product | Peptide | Product |
| 4-1BBL* | T2A | IL-12p70 | | | | |
| 4-1BBL* | T2A | Chimeric | | | | |
| | | STING** | | | | |
| 4-1BBL* | T2A | IL-12p70 | P2A | Chimeric | | |
| | | | | STING** | | |
| IL-12p70 | T2A | Chimeric | | | | |
| | | STING** | | | | |
| IL-12p70 | T2A | IL-15 | | | | |
| IL-12p70 | T2A | IL-21 | | | | |
| IL-12p70 | T2A | IL-15 | | | | |
| IL-12p70 | T2A | IL-21 | | | | |
| IL-21 | T2A | IL-12p70 | | | | |
| IL-12p70 | T2A | IL-36γ | | | | |
| IL-36γ | T2A | IL-12p70 | | | | |
| 4-1BBL* | T2A | IL-12p70 | P2A | IL-15 | | |
| 4-1BBL* | T2A | IL-12p70 | P2A | IL-21 | | |
| 4-1BBL* | T2A | IL-12p70 | P2A | IL-36γ | | |
| 4-1BBL* | T2A | IL-12p70 | P2A | IL-15 | T2A | Chimeric |
| | | | | | | STING** |
| 4-1BBL* | T2A | IL-12p70 | P2A | IL-21 | T2A | Chimeric |
| | | | | | | STING** |
| 4-1BBL* | T2A | IL-12p70 | P2A | IL-36γ | T2A | Chimeric |
| | | | | | | STING** |
| IL-12p70 | T2A | IL-21 | P2A | Chimeric | | |
| | | | | STING** | | |
| IL-21 | T2A | IL-12p70 | P2A | Chimeric | | |
| | | | | STING** | | |
| IL-12p70 | T2A | IL-15 | P2A | Chimeric | | |
| | | | | STING** | | |
| IL-12p70 | T2A | IL-36γ | P2A | Chimeric | | |
| | | | | STING** | | |
| IL-36γ | T2A | IL-12p70 | P2A | Chimeric | | |
| | | | | STING** | | |
| Anti-CTLA-4 | T2A | IL-12p70 | | | | |
| scFv-Fc | | | | | | |
| Anti-CTLA-4 | T2A | IL-12p70 | P2A | Chimeric | | |
| scFv-Fc | | | | STING** | | |
| Anti-CTLA-4 | T2A | IL-12p70 | P2A | IL-15 | T2A | |
| scFv-Fc | | | | | | |
| Anti-CTLA-4 | T2A | IL-12p70 | P2A | IL-21 | T2A | |
| scFv-Fc | | | | | | |
| Anti-CTLA-4 | T2A | IL-12p70 | P2A | IL-36γ | T2A | |
| scFv-Fc | | | | | | |
| 4-1BBL* | T2A | sTGFβRIIFc^{#} | | | T2A | |
| sTGFβRIIFc^{#} | T2A | IL-12p70 | P2A | Chimeric | | |
| | | | | STING** | | |
| 4-1BBL* | T2A | sTGFβRIIFc^{#} | P2A | IL-12p70 | T2A | |
| 4-1BBL* | T2A | IL-12p70 | P2A | sTGFβRIIFc# | T2A | |
| IL-36γ | T2A | IL-23 | P2A | OX40L | | |

*4-1BBL = the modified 4-1BBL with the cytoplasmic truncation and residue modifications to render the remaining cytoplasmic domain more positive to retain correct orientation with respect to the cell membrane.
**Chimeric STING = STING with the Tasmanian Devil CTT and the replacements R284G/N154S.
sTGFβRIIFc^{#} = type II receptor betaglycan.

[0983] Other combinations of products are contemplated (see discussions above and Examples). Other such combinations of interest include any of the modified STING proteins and a cytokine, such as a chimeric STING, such as the human chimera with the Tasmanian Devil CTT, and particularly with one or more gain-of-function mutations, such as N154S/R284G. The complementary combinations, discussed herein, can provide synergistic results. For example, the combination of the chimeric STING polypeptide and IL-15/IL-15R alpha chain complex (IL-15Rα-IL-15sc), shown in the Examples, acts synergistically to improve anti-tumor effectiveness.

[0984] The properties of the immunostimulatory bacteria provided herein, such as the accumulation in tumor-resident myeloid cells, and in the TME, and the combinations of products/payloads that can be expressed, can be selected to cover the cancer immunity cycle. Each step in the cycle, and the role of the immunostimulatory bacteria and payloads is summarized as follows:

[0985] 1) Release of cancer cell antigens—the immunostimulatory bacteria accumulate in the tumor-resident myeloid cells;

[0986] 2) Cancer antigen presentation—the immunostimulatory bacteria provided herein encode and express immune stimulators, such as the STING polypeptides and variants thereof, and IL-12, leading to the expression of type I interferons, including IFN-α and IFN-β;

[0987] 3) Priming and activation—the immunostimulatory bacteria encode the STING polypeptides and variants thereof, and the co-stimulatory proteins, such as 4-1BBL, and IL-12;

[0988] 4) Trafficking of the T-cells to the tumor—the encoded STING variants are expressed, leading to the consequent expression of IFN-α and IFN-β;

[0989] 5) Infiltration of T-cells into the tumor—vascular leakage and repolarization of immunosuppressive myeloid cells;

[0990] 6) Cancer cell recognition by T-cells—Type I IFN, and IFNγ, and upregulation of MHC; and

[0991] 7) Killing of cancer cells—the combination of encoded cytokines/chemokines, such as IL-12, IL-15, IL-15/IL-15R alpha chain complex (IL-15Rα-IL-15sc), IL-21, and/or IL-367, which induce T-cell proliferation and release of IFN-γ, and the expression of a soluble TGF-β decoy receptor.

[0992] A skilled person, based on the disclosure herein and their knowledge, can identify other product payload combinations and other orders of the products as encoded on a polycistronic construct, that have immune-activating and/or immune suppressing effects, to enhance the anti-tumor activities of the immunostimulatory bacteria provided herein.

### E. Immunostimulatory Bacteria as Antiviral Therapeutics and as Therapeutics Against Other Infectious Pathogens

[0993] Immunosuppression of a host immune response plays a role in many infectious diseases, and particularly, in persistent viral infection, as well as in tumor immunosuppression. In persistent infections, the virus remains in specific cells of infected individuals. There are several types of persistent virus-host interactions: latent, chronic, and slow infections. In latent infections, there is no detectable infectious virus between episodes of recurrent disease; in chronic infections, there is continued presence of infectious virus following a primary infection, and there is chronic or recurrent disease. Slow infection is characterized by a prolonged incubation period, followed by progressive disease. During persistent infections, the viral genome can be stably integrated into the cellular DNA, or can be maintained episomally. Persistent infection occurs with numerous viruses and infectious agents, including, but not limited to, human T-cell leukemia viruses, Epstein-Barr virus, cytomegalovirus, herpesviruses, varicella zoster virus, measles virus, papovaviruses, prions, hepatitis viruses (including types A, B, C, D, and E), adenoviruses, parvoviruses, coronaviruses, human immunodeficiency virus (HIV), smallpox viruses, poliovirus, influenza viruses, rotaviruses, yellow fever virus, mumps virus, rubella virus, and papillomaviruses.

[0994] Bacteria have been used as delivery vehicles for vaccines and other anti-pathogen therapeutics, and have been used as vaccines for eliciting an immune response against a peptide that is foreign to the bacterial vector. For example, an S. typhi TY21a strain, containing a VEGFR2-encoding plasmid, induces VEGFR2-specific T-cell responses in humans (see, e.g., Schmitz-Winnenthal et al. (2016) Journal of Clinical Oncology 34(15_suppl):3091-3091, DOI: 10.1200/JCO.2016.34.15_suppl.3091). The prior approaches using bacteria as vaccine vehicles, however, have had limited clinical success. The FDA-approved bacterially-based vaccines only are for use against other bacterial diseases, and have not effectively induced anti-tumor or antiviral immunity in humans. As discussed herein, the immunostimulatory bacteria provided herein address these problems.

[0995] One way in which antiviral vaccines work is by delivering antigens that induce antibodies that are specific for the surface glycoproteins of enveloped viruses, or that are specific for the capsid proteins of non-enveloped viruses. Antibodies are the primary element of adaptive immunity, which is designed to pre-exist at protective levels, and to be present or induced during re-exposure to a viral pathogen. Pre-existing antibodies act with the speed of innate immunity, but with more specificity, higher avidity, and targeted functionality. An immunological goal for immunization is the induction of durable protective antibody responses. Protective antibody responses generally work best when they are neutralizing and inhibit infection. Neutralization can occur by three major mechanisms. A first mechanism, aggregation or immobilization of the virus, reduces the infectious inoculum by preventing the virus from reaching the target cell. A second mechanism involves an antibody directly blocking the attachment of the virus to a target cell, by blocking the receptor-binding domain. The third mechanism, neutralization, can occur post-attachment of the virus to a target cell, by preventing entry of the virus into the cell, or by uncoating through fusion inhibition. Neutralizing antibodies need to recognize oligomeric surface proteins in their native state, or in intermediate forms that may be transiently present before completion of the fusion process. These epitopes are generally conformational, and are often quaternary epitopes, and are not often present on monomeric forms of viral proteins.

[0996] Although antibodies are recognized as the primary mechanism of vaccine-induced protective immunity, virus-specific CD8⁺ T-cell responses also are important for controlling virus infection, and for limiting the severity of disease (see, e.g., Graham (2013) Immunol. Rev. 255(1):230-242). Antibody-mediated effector mechanisms are for preventing infection; CD8⁺ T-cell-mediated effector mechanisms are for recognizing and clearing virus-infected cells. Since the immunostimulatory bacteria provided herein infect myeloid cells, the immunostimulatory bacteria can enhance antigen presentation to T-cells, inducing T-cell mediated responses. Antigen-specific cytotoxic T-lymphocytes (CTLs) are a sub-group of CD8⁺ T-cells that are activated by interaction with antigens that are presented on the cell surface in a complex with major histocompatibility complex class I (MHC I), which is the presentation pathway for cytosolic proteins of mammalian cells. Antigens are synthesized by bacterial pathogens, or bacterial vaccines release antigens into the cytoplasm, eliciting the cellular immune response by CTLs. Following this activation, CTLs are directed against infected cells that display the relevant antigenic peptides in complex with MHC I. Antigens also can be directly presented by MHC class II molecules on APCs (antigen-presenting cells) to CD4⁺ helper cells, which can promote B-cell production of antibodies.

[0997] A limitation of prior bacterial vaccine and anti-pathogen strategies is that they rely on bacterial sensing pathways as adjuvants, which, as described herein, do not lead to strong adaptive antiviral or anti-tumor immunity. The immunostimulatory bacteria provided herein address these limitations. The immunostimulatory bacteria provided herein provide for the priming of heterologous proteins, including viral antigens, and other antiviral therapeutics, in the context of strong viral-sensing immune pathways, leading to effective antiviral vaccination, and also, to anti-tumor treatments. As detailed herein, the immunostimulatory bacteria provided herein lack many of the bacterial TLR sensing pathways, and eliminate the skewing of immunity towards innate antibacterial responses, while retaining antiviral pathways. During viral infection, as well as in subjects with cancer, innate immune signaling pathways, including toll-like receptors (TLRs), retinoic acid inducible gene-I (RIG-I)-like receptors (RLRs), and cytoplasmic DNA sensors, are activated for the synthesis of antiviral molecules, such as type I interferons (IFNs) and pro-inflammatory cytokines. The immunostimulatory bacteria provided herein are designed to stimulate such pathways by virtue of the genomic modifications, and also, the encoded therapeutic cargo(es), such as the STING proteins and modified STING proteins, cytokines, and chemokines.

[0998] The immunostimulatory bacteria provided herein advantageously, by virtue of genomic modifications, and, optional encoded therapeutic products, can direct the host immune response to be antiviral in nature. The immunostimulatory bacteria provided herein, as discussed, infect myeloid cells to deliver encoded anti-pathogen therapeutic products, such as antigens, antibodies, and other encoded therapeutics, and can encode additional products, such as immunostimulatory proteins, to enhance a host's immune response. Thus, the immunostimulatory bacteria can provide a variety of attacks on pathogens.

[0999] The immunostimulatory bacteria provided herein, in subjects who have a tumor, accumulate in tumor-resident immune cells. In subjects who do not have a tumor, the bacteria primarily, or only, infect phagocytic antigen-presenting cells (APCs), which are cells that are very capable of transferring plasmids that can be read by the eukaryotic machinery, and produce proteins in their natural context. The plasmids encode single or multiple heterologous proteins, including, for example, viral antigens and other antiviral therapeutics, and also, can encode single or multiplexed immune payloads that induce antiviral immune-sensing pathways. The result is proper APC activation and antigen priming of T-cells, leading to durable humoral and cellular antiviral immunity, even in chronic infection environments, where suppressive myeloid cells prevent adaptive immunity.

[1000] Hence, provided herein are immunostimulatory bacteria that deliver protein antigens and antibodies, and other therapeutics for vaccination against pathogens, or for the treatment of resulting infections, including persistent viral infections. The pathogens include bacteria, protozoans, viruses, and prions, and other prion-like particles that cause diseases and disorders. Among the immunostimulatory bacteria, and exemplary of such bacteria, are strains/species of Salmonella, such as S. typhimurium. The immunostimulatory bacteria can encode the anti-pathogen products under control of a bacterial or a eukaryotic promoter. The promoter can be constitutive or can be inducible. Selection of the promoter, and other regulatory sequences, depends upon factors that include the particular product, the timing of expression of the product, and the use of the bacteria, such as whether they are for the treatment of an existing infection, or are for vaccination. The bacteria, which generally are asd⁻, can encode asd on the plasmid to permit replication upon infection of the host cells with the bacteria, without any need for an antibiotic selection cassette. This permits the bacteria to replicate in vivo. As an alternative, a suicide system can be used to deliver payloads, (i.e., therapeutic products) to tissue-resident myeloid cells. In this context, the bacteria are dosed in vivo using an asd⁻ strain that lacks a plasmid containing a complementing asd gene cassette. In vitro, diaminopimelic acid (DAP) is added to facilitate bacterial replication in the absence of a functional asd gene; such bacteria cannot grow in vivo. One bolus of the bacterial nucleic acid is delivered to tissue-resident myeloid cells after phagocytosis and intracellular destruction of the bacteria.

[1001] The immunostimulatory bacteria provided herein, including Salmonella, specifically target myeloid cells, including antigen-presenting cells (APCs), in the infected organism. APCs can migrate into lymph nodes, the spleen, and liver, providing presentation of expressed antigens to lymph node resident T-cells. The bacteria can be taken up by dendritic cells, which then express the antigens for the presentation pathway by MHC I and MHC II, and in turn, initiate specific T-cell responses. The immunostimulatory bacteria provided herein can exploit these pathways when used as vaccines, or to encode viral antigens and/or other proteins to protect against pathogens, such as influenza viruses, Ebola virus, Severe Acute Respiratory Syndrome coronavirus (SARS-CoV), Middle East Respiratory Syndrome coronavirus (MERS-CoV), and Severe Acute Respiratory Syndrome coronavirus 2 (SARS-CoV-2, which causes COVID-19), Porphyromonas gingivalis (P. gingivalis), and others as set forth herein and/or as known to those of skill in the art. Targets include proteins, such as the spike protein of the coronaviruses (see, e.g., SEQ ID NO:438), and gingipain protease of Porphyromonas gingivalis (see, e.g., SEQ ID NOs: 442-447), particularly the lysine-gingipain protease (Kgp or Lys-gingipain) from P. gingivalis strain ATCC 332277 (see, e.g., SEQ ID NO:444), and lysine-gingipain proteases from other strains of Porphyromonas gingivalis, including strains 83, FDC381, and HG66 (see, e.g., SEQ ID NOs: 445-447, respectively). Bacterial pathogens include, for example, species of Escherichia, Klebsiella, Staphylococcus, Acinetobacter, and Pseudomonas, particularly drug-resistant species and strains. Those of skill in the art readily can identify antigens to target. For anti-tumor applications, tumor antigens (see, e.g., the Examples for exemplary tumor antigens), and proteases, reverse transcriptases (for RNA viruses), and DNA polymerases, and other replicative enzymes, can be targets. Exemplary species of pathogenic bacteria, include, but are not limited to: E. coli, S. aureus, P. aeruginosa, K. pneumoniae, E. faecalis, and S. pneumoniae.

[1002] Severe acute respiratory syndrome coronavirus 2 (SARS-CoV-2) is a novel beta-coronavirus that is the causative agent of the coronavirus disease 2019 (COVID-19) pandemic. Coronavirus virions contain a self-surface spike (S) glycoprotein that binds to host cell angiotensin-converting enzyme 2 (ACE2) receptors, and mediates entry via fusion of the host and viral membranes. The binding of the SARS-CoV-2 spike protein to the ACE2 receptor causes a larger conformational rearrangement of spike protein, from a metastable pre-fusion conformation, to a highly stable post-fusion conformation, which facilitates membrane fusion. Because it mediates cell attachment and entry, the spike (S) protein is essential for the viral life cycle, and is a primary target for neutralizing antibodies, and is a critical vaccine antigen (see, e.g., Hsieh et al. (2020) Science 369:1501-1505).

[1003] SARS-COV2 virus proteins that draw the best or good CD8⁺, include the following (see, Cohen et al. (2021) Cell. Rep. Med. 2:100354):

| SARS-CoV-2 | CD8 T-cell | |
|---|---|---|
| protein | response rate | SEQ ID NO |
| S1 | 25% | 438 (full length spike protein); |
| | | 439 (glycoprotein gene) |
| S2 | 12% | 438 (full length spike protein); |
| | | 439 (glycoprotein gene) |
| Envelope (E) | 9% | 450 (gene); 451 (protein) |
| Membrane (M) | | 452 (gene); 453 (protein) |
| Nucleocapsid (N) | 57% | 462 (gene); 463 (protein) |
| ORF3a | 16% | 448 (gene); 449 (protein) |
| ORF6 | | 454 (gene); 455 (protein) |
| ORF7a | 25% | 456 (gene); 457 (protein) |
| ORF7b | | 458 (gene); 459 (protein) |
| ORF8 | | 460 (gene); 461 (protein) |

[1004] The receptor-binding domain (RBD; see, e.g., SEQ ID NO:440) in the S1 subunit of the spike protein interacts directly with ACE2. The metastable pre-fusion conformation of the S protein may be referred to as “laying or down,” while the conformational rearrangement into an ACE2-feasible conformation may be referred to as “up or standing.” The “down” and “up” poses are differentiated based on the conformational rearrangement of the RBD; the down-to-up rearrangement facilitates receptor binding, while the rearrangement of up-to-down helps the virus to evade immune surveillance (see, e.g., Shah et al. (2020) Computational and Structural Biotechnology Journal 18:3401-3414).

[1005] Binding to the ACE2 receptor is followed by cleavage with transmembrane protease serine 2 (TMPRSS2). Both ACE2 and TMPRSS2 are abundantly expressed in the airways, lungs, and nasal/oral mucosa, as well as in the intestines. Naturally occurring mutations in the S protein have been identified in China (H49Y), Europe (V367F and D614G), and the United States (G476S and V483A), and have been studied for their effects on cell entry of SARS-CoV-2; in cells expressing ACE2 and TMPRSS2, the G476S mutation results in reduced cell entry, and the V483A mutation has no effect on cell entry, whereas the D614G, V367F, and H49Y mutations result in enhanced cell entry compared to that of the wild-type S protein. The D614G mutation displays a 3.5-fold higher level of entry activity compared to the wild-type S protein, an effect that is also seen in human small airway epithelial cells. The D614G mutation also results in increased binding affinity for the ACE2 receptor. Furthermore, the D614G mutant retains the neutralization sensitivity of the SARS-CoV-2 virus; anti-SARS-CoV-2 patient sera was able to effectively neutralize both wild-type SARS-CoV-2 and SARS-CoV-2 with the D614G mutation (see, e.g., Ozono et al. (2021) Nature Communications 12:848). The S protein exists as a trimer, and structural analyses indicate that the D614G mutation stabilizes, and thus, prevents premature dissociation of the S trimer (see, e.g., Zhang et al. (2021) Science 372:525-530). The V367F mutant also displays higher binding affinity to ACE2 compared to the reference strain Wuhan-Hu-1, as first isolated in Wuhan in December 2019, which may be due to stabilization of the RBD structure. Virus isolates also have been identified with both the V367F and D614G mutations. Phylogenetic analyses suggest that the V367F mutation evolved along with the D614G mutation, suggesting a synergistic effect of increased infectivity (see, e.g., Ou et al. (2021) bioRvix, doi:10.1101/2020.03.15.991844).

[1006] The N501Y mutation has naturally emerged in SARS-CoV-2 lineages in the UK (B.1.1.7, or 20B/501Y.v1) and South Africa (B.1.351, or 20C/501Y.v2), and occurs at the human ACE2 binding site on the RBD of the SARS-CoV-2 S protein. Molecular dynamic stimulations reveal that N501 in the SARS-CoV-2 S protein RBD is in the proximity of hydrophobic residues of human ACE2; thus, the mutation of hydrophilic N501 into a hydrophobic residue can improve interactions between the S protein and human ACE2. Experimental screens suggest that mutation of N501 into V, F, W, or Y can enhance binding of the RBD with human ACE2. These results have been validated in an in vitro study, showing that the mutations N501Y, N501F, N501W, and N501V result in enhanced binding affinity between the RBD of the spike protein and human ACE2 (see, e.g., Luan et al. (2021) FEBS Letters, doi:10.1002/1873-3468.14076).

[1007] A mutant of the SARS-CoV-2 S-2P variant spike protein (see, e.g., Hsieh et al. (2020) Science 369:1501-1505), with the proline substitutions F817P, A892P, A899P, A942P, K986P, and V987P, designated “HexaPro,” displayed increased expression levels and stability compared to its parental construct. The high yield and increased stability of the HexaPro mutant should allow for the industrial production of subunit vaccines; it can also improve DNA- or mRNA-based vaccines by producing more antigen per nucleic acid molecule, improving the efficacy and/or reducing the dosage required (see, e.g., Hsieh et al. (2020) Science 369:1501-1505).

[1008] Other mutations in the SARS-CoV-2 spike protein, that can enhance or improve its expression and/or its binding to the ACE2 receptor, include, for example, V417K (see, e.g., Shah et al. (2020) Computational and Structural Biotechnology Journal 18:3402-3414); G502D, N501T, and Q498Y, as well as mutations in the residues N439/R426, L452/R426, T470/N457, E484/P470, Q498/Y484 and N501/T487 (see, e.g., Verkhivker et al. (2021) Biochemistry 60(19):1459-1484); and W436R and D364Y (see, e.g., Ou et al. (2021) bioRvix, doi:10.1101/2020.03.15.991844; and U.S. Pat. No. 10,973,908).

[1009] The immunostimulatory bacteria provided herein, when used as vaccines, or to encode viral antigens and/or other proteins to protect against pathogens, such as Severe Acute Respiratory Syndrome coronavirus 2 (SARS-CoV-2, which causes COVID-19), can encode the full length wild-type SARS-CoV-2 spike protein (see, e.g., SEQ ID NO:438), or can encode the full length receptor binding domain (RBD) of the SARS-CoV-2 spike protein (see, SEQ ID NO:440), or can encode a portion of the spike protein RBD that is sufficient to induce or cause an immune response, and/or to immunize or vaccinate or protect a subject against SARS-CoV-2. The immunostimulatory bacteria also can encode mutants of the SARS-CoV-2 spike protein, with mutations in the spike protein or a portion thereof, such as the RBD or a portion thereof, that increase or enhance the expression of the spike protein or RBD or portions thereof, and/or that increase or enhance the binding of the spike protein or RBD, or the portions thereof to the ACE2 receptor. The spike protein or spike protein RBD mutants include any described herein and known in the art, including, but not limited to, those comprising the mutations V367F, D614G, G476S, V483A, H49Y, N501Y, N501F, N501W, N501V, F817P, A892P, A899P, A942P, K986P, V987P, V417K, G502D, N501T, Q498Y, W436R and D364Y, and those comprising mutations at residues corresponding to residues N439/R426, L452/R426, T470/N457, E484/P470, Q498/Y484 and N501/T487 of the spike protein or portion thereof. The immunostimulatory bacteria can be used as vaccines against SARS-CoV-2 by encoding any of the antigenic sequences or modified forms of the spike protein or RBD, including portions thereof, described, for example, in U.S. Pat. Nos. 10,973,908 and 10,702,600. The immunostimulatory bacteria also can be used as vaccines, to deliver the mRNA sequences utilized in the Pfizer-BioNTech COVID-19 vaccine, or in the Moderna COVID-19 vaccine, wherein:

[1010] 1) the sequence of the mRNA in the Pfizer-BioNTech COVID-19 vaccine, as released by the World Health Organization, includes a 5′-capping structure, a 5′ untranslated region (UTR), the extended signal sequence of the S glycoprotein, nucleic acid encoding the full-length spike (S) glycoprotein sequence containing the mutations K986P and V987P, and a poly(A) tail, and comprises the following sequence (SEQ ID NO:496):

GAGAAΨAAAC ΨAGΨAΨΨCΨΨ CΨGGΨCCCCA CAGACΨCAGA GAGAACCCGC 50
CACCAΨGΨΨC GΨGΨΨCCΨGG ΨGCΨGCΨGCC ΨCΨGGΨGΨCC AGCCAGΨGΨG 100
ΨGAACCΨGAC CACCAGAACA CAGCΨGCCΨC CAGCCΨACAC CAACAGCΨΨΨ 150
ACCAGAGGCG ΨGΨACΨACCC CGACAAGGΨG ΨΨCAGAΨCCA GCGΨGCΨGCA 200
CΨCΨACCCAG GACCΨGΨΨCC ΨGCCΨΨΨCΨΨ CAGCAACGΨG ACCΨGGΨΨCC 250
ACGCCAΨCCA CGΨGΨCCGGC ACCAAΨGGCA CCAAGAGAΨΨ CGACAACCCC 300
GΨGCΨGCCCΨ ΨCAACGACGG GGΨGΨACΨΨΨ GCCAGCACCG AGAAGΨCCAA 350
CAΨCAΨCAGA GGCΨGGAΨCΨ ΨCGGCACCAC ACΨGGACAGC AAGACCCAGA 400
GCCΨGCΨGAΨ CGΨGAACAAC GCCACCAACG ΨGGΨCAΨCAA AGΨGΨGCGAG 450
ΨΨCCAGΨΨCΨ GCAACGACCC CΨΨCCΨGGGC GΨCΨACΨACC ACAAGAACAA 500
CAAGAGCΨGG AΨGGAAAGCG AGΨΨCCGGGΨ GΨACAGCAGC GCCAACAACΨ 550
GCACCΨΨCGA GΨACGΨGΨCC CAGCCΨΨΨCC ΨGAΨGGACCΨ GGAAGGCAAG 600
CAGGGCAACΨ ΨCAAGAACCΨ GCGCGAGΨΨC GΨGΨΨΨAAGA ACAΨCGACGG 650
CΨACΨΨCAAG AΨCΨACAGCA AGCACACCCC ΨAΨCAACCΨC GΨGCGGGAΨC 700
ΨGCCΨCAGGG CΨΨCΨCΨGCΨ CΨGGAACCCC ΨGGΨGGAΨCΨ GCCCAΨCGGC 750
AΨCAACAΨCA CCCGGΨΨΨCA GACACΨGCΨG GCCCΨGCACA GAAGCΨACCΨ 800
GACACCΨGGC GAΨAGCAGCA GCGGAΨGGAC AGCΨGGΨGCC GCCGCΨΨACΨ 850
AΨGΨGGGCΨA CCΨGCAGCCΨ AGAACCΨΨCC ΨGCΨGAAGΨA CAACGAGAAC 900
GGCACCAΨCA CCGACGCCGΨ GGAΨΨGΨGCΨ CΨGGAΨCCΨC ΨGAGCGAGAC 950
AAAGΨGCACC CΨGAAGΨCCΨ ΨCACCGΨGGA AAAGGGCAΨC ΨACCAGACCA 1000
GCAACΨΨCCG GGΨGCAGCCC ACCGAAΨCCA ΨCGΨGCGGΨΨ CCCCAAΨAΨC 1050
ACCAAΨCΨGΨ GCCCCΨΨCGG CGAGGΨGΨΨC AAΨGCCACCA GAΨΨCGCCΨC 1100
ΨGΨGΨACGCC ΨGGAACCGGA AGCGGAΨCAG CAAΨΨGCGΨG GCCGACΨACΨ 1150
CCGΨGCΨGΨA CAACΨCCGCC AGCΨΨCAGCA CCΨΨCAAGΨG CΨACGGCGΨG 1200
ΨCCCCΨACCA AGCΨGAACGA CCΨGΨGCΨΨC ACAAACGΨGΨ ACGCCGACAG 1250
CΨΨCGΨGAΨC CGGGGAGAΨG AAGΨGCGGCA GAΨΨGCCCCΨ GGACAGACAG 1300
GCAAGAΨCGC CGACΨACAAC ΨACAAGCΨGC CCGACGACΨΨ CACCGGCΨGΨ 1350
GΨGAΨΨGCCΨ GGAACAGCAA CAACCΨGGAC ΨCCAAAGΨCG GCGGCAACΨA 1400
CAAΨΨACCΨG ΨACCGGCΨGΨ ΨCCGGAAGΨC CAAΨCΨGAAG CCCΨΨCGAGC 1450
GGGACAΨCΨC CACCGAGAΨC ΨAΨCAGGCCG GCAGCACCCC ΨΨGΨAACGGC 1500
GΨGGAAGGCΨ ΨCAACΨGCΨA CΨΨCCCACΨG CAGΨCCΨACG GCΨΨΨCAGCC 1550
CACAAAΨGGC GΨGGGCΨAΨC AGCCCΨACAG AGΨGGΨGGΨG CΨGAGCΨΨCG 1600
AACΨGCΨGCA ΨGCCCCΨGCC ACAGΨGΨGCG GCCCΨAAGAA AAGCACCAAΨ 1650
CΨCGΨGAAGA ACAAAΨGCGΨ GAACΨΨCAAC ΨΨCAACGGCC ΨGACCGGCAC 1700
CGGCGΨGCΨG ACAGAGAGCA ACAAGAAGΨΨ CCΨGCCAΨΨC CAGCAGΨΨΨG 1750
GCCGGGAΨAΨ CGCCGAΨACC ACAGACGCCG ΨΨAGAGAΨCC CCAGACACΨG 1800
GAAAΨCCΨGG ACAΨCACCCC ΨΨGCAGCΨΨC GGCGGAGΨGΨ CΨGΨGAΨCAC 1850
CCCΨGGCACC AACACCAGCA AΨCAGGΨGGC AGΨGCΨGΨAC CAGGACGΨGA 1900
ACΨGΨACCGA AGΨGCCCGΨG GCCAΨΨCACG CCGAΨCAGCΨ GACACCΨACA 1950
ΨGGCGGGΨGΨ ACΨCCACCGG CAGCAAΨGΨG ΨΨΨCAGACCA GAGCCGGCΨG 2000
ΨCΨGAΨCGGA GCCGAGCACG ΨGAACAAΨAG CΨACGAGΨGC GACAΨCCCCA 2050
ΨCGGCGCΨGG AAΨCΨGCGCC AGCΨACCAGA CACAGACAAA CAGCCCΨCGG 2100
AGAGCCAGAA GCGΨGGCCAG CCAGAGCAΨC AΨΨGCCΨACA CAAΨGΨCΨCΨ 2150
GGGCGCCGAG AACAGCGΨGG CCΨACΨCCAA CAACΨCΨAΨC GCΨAΨCCCCA 2200
CCAACΨΨCAC CAΨCAGCGΨG ACCACAGAGA ΨCCΨGCCΨGΨ GΨCCAΨGACC 2250
AAGACCAGCG ΨGGACΨGCAC CAΨGΨACAΨC ΨGCGGCGAΨΨ CCACCGAGΨG 2300
CΨCCAACCΨG CΨGCΨGCAGΨ ACGGCAGCΨΨ CΨGCACCCAG CΨGAAΨAGAG 2350
CCCΨGACAGG GAΨCGCCGΨG GAACAGGACA AGAACACCCA AGAGGΨGΨΨC 2400
GCCCAAGΨGA AGCAGAΨCΨA CAAGACCCCΨ CCΨAΨCAAGG ACΨΨCGGCGG 2450
CΨΨCAAΨΨΨC AGCCAGAΨΨC ΨGCCCGAΨCC ΨAGCAAGCCC AGCAAGCGGA 2500
GCΨΨCAΨCGA GGACCΨGCΨG ΨΨCAACAAAG ΨGACACΨGGC CGACGCCGGC 2550
ΨΨCAΨCAAGC AGΨAΨGGCGA ΨΨGΨCΨGGGC GACAΨΨGCCG CCAGGGAΨCΨ 2600
GAΨΨΨGCGCC CAGAAGΨΨΨA ACGGACΨGAC AGΨGCΨGCCΨ CCΨCΨGCΨGA 2650
CCGAΨGAGAΨ GAΨCGCCCAG ΨACACAΨCΨG CCCΨGCΨGGC CGGCACAAΨC 2700
ACAAGCGGCΨ GGACAΨΨΨGG AGCAGGCGCC GCΨCΨGCAGA ΨCCCCΨΨΨGC 2750
ΨAΨGCAGAΨG GCCΨACCGGΨ ΨCAACGGCAΨ CGGAGΨGACC CAGAAΨGΨGC 2800
ΨGΨACGAGAA CCAGAAGCΨG AΨCGCCAACC AGΨΨCAACAG CGCCAΨCGGC 2850
AAGAΨCCAGG ACAGCCΨGAG CAGCACAGCA AGCGCCCΨGG GAAAGCΨGCA 2900
GGACGΨGGΨC AACCAGAAΨG CCCAGGCACΨ GAACACCCΨG GΨCAAGCAGC 2950
ΨGΨCCΨCCAA CΨΨCGGCGCC AΨCAGCΨCΨG ΨGCΨGAACGA ΨAΨCCΨGAGC 3000
AGACΨGGACC CΨCCΨGAGGC CGAGGΨGCAG AΨCGACAGAC ΨGAΨCACAGG 3050
CAGACΨGCAG AGCCΨCCAGA CAΨACGΨGAC CCAGCAGCΨG AΨCAGAGCCG 3100
CCGAGAΨΨAG AGCCΨCΨGCC AAΨCΨGGCCG CCACCAAGAΨ GΨCΨGAGΨGΨ 3150
GΨGCΨGGGCC AGAGCAAGAG AGΨGGACΨΨΨ ΨGCGGCAAGG GCΨACCACCΨ 3200
GAΨGAGCΨΨC CCΨCAGΨCΨG CCCCΨCACGG CGΨGGΨGΨΨΨ CΨGCACGΨGA 3250
CAΨAΨGΨGCC CGCΨCAAGAG AAGAAΨΨΨCA CCACCGCΨCC AGCCAΨCΨGC 3300
CACGACGGCA AAGCCCACΨΨ ΨCCΨAGAGAA GGCGΨGΨΨCG ΨGΨCCAACGG 3350
CACCCAΨΨGG ΨΨCGΨGACAC AGCGGAACΨΨ CΨACGAGCCC CAGAΨCAΨCA 3400
CCACCGACAA CACCΨΨCGΨG ΨCΨGGCAACΨ GCGACGΨCGΨ GAΨCGGCAΨΨ 3450
GΨGAACAAΨA CCGΨGΨACGA CCCΨCΨGCAG CCCGAGCΨGG ACAGCΨΨCAA 3500
AGAGGAACΨG GACAAGΨACΨ ΨΨAAGAACCA CACAAGCCCC GACGΨGGACC 3550
ΨGGGCGAΨAΨ CAGCGGAAΨC AAΨGCCAGCG ΨCGΨGAACAΨ CCAGAAAGAG 3600
AΨCGACCGGC ΨGAACGAGGΨ GGCCAAGAAΨ CΨGAACGAGA GCCΨGAΨCGA 3650
CCΨGCAAGAA CΨGGGGAAGΨ ACGAGCAGΨA CAΨCAAGΨGG CCCΨGGΨACA 3700
ΨCΨGGCΨGGG CΨΨΨAΨCGCC GGACΨGAΨΨG CCAΨCGΨGAΨ GGΨCACAAΨC 3750
AΨGCΨGΨGΨΨ GCAΨGACCAG CΨGCΨGΨAGC ΨGCCΨGAAGG GCΨGΨΨGΨAG 3800
CΨGΨGGCAGC ΨGCΨGCAAGΨ ΨCGACGAGGA CGAΨΨCΨGAG CCCGΨGCΨGA 3850
AGGGCGΨGAA ACΨGCACΨAC ACAΨGAΨGAC ΨCGAGCΨGGΨ ACΨGCAΨGCA 3900
CGCAAΨGCΨA GCΨGCCCCΨΨ ΨCCCGΨCCΨG GGΨACCCCGA GΨCΨCCCCCG 3950
ACCΨCGGGΨC CCAGGΨAΨGC ΨCCCACCΨCC ACCΨGCCCCA CΨCACCACCΨ 4000
CΨGCΨAGΨΨC CAGACACCΨC CCAAGCACGC AGCAAΨGCAG CΨCAAAACGC 4050
ΨΨAGCCΨAGC CACACCCCCA CGGGAAACAG CAGΨGAΨΨAA CCΨΨΨAGCAA 4100
ΨAAACGAAAG ΨΨΨAACΨAAG CΨAΨACΨAAC CCCAGGGΨΨG GΨCAAΨΨΨCG 4150
ΨGCCAGCCAC ACCCΨGGAGC ΨAGCAAAAAA AAAAAAAAAA AAAAAAAAAA 4200
AAAAGCAΨAΨ GACΨAAAAAA AAAAAAAAAA AAAAAAAAAA AAAAAAAAAA 4250
AAAAAAAAAA AAAAAAAAAA AAAAAAAAAA AAAA 4284

where Ψ=1-methyl-3′-pseudouridylyl, and the sequence has the following features:

| | | Nucleotide |
|---|---|---|
| Element | Description | Position |
| cap | A modified 5′-cap1 structure | 1-2 |
| | (m⁷G⁺m^{3′}-5′-ppp-5′-Am) | |
| 5′-UTR | 5′-untranslated region derived from | 3-54 |
| | human alpha-globin RNA with an | |
| | optimized Kozak sequence | |
| sig | S glycoprotein signal peptide (extended | 55-102 |
| | leader sequence), which guides trans- | |
| | location of the nascent polypeptide | |
| | chain into the endoplasmic reticulum. | |
| S | Codon-optimized sequence encoding full- | 103-3879 |
| protein_mut | length SARS-CoV-2 spike (S) glycoprotein | |
| | containing mutations K986P and V987P to | |
| | ensure the S glycoprotein remains in an | |
| | antigenically optimal pre-fusion | |
| | conformation; stop codons: 3874-3879 | |
| | (underlined) | |
| 3′-UTR | The 3′ untranslated region comprises | 3880-4174 |
| | two sequence elements derived from the | |
| | amino-terminal enhancer of split (AES) | |
| | mRNA and the mitochondrial encoded 12S | |
| | ribosomal RNA to confer RNA stability | |
| | and high total protein expression. | |
| poly(A) | A 110-nucleotide poly(A)-tail consisting | 4175-4284 |
| | of a stretch of 30 adenosine residues, | |
| | followed by a 10-nucleotide linker se- | |
| | quence and another 70 adenosine residues. | |

and the structure of the 5′ capping structure is.

[chemical structure]

and the structure of m1Ψ=1-methyl-3′-pseudouridylyl is:

[chemical structure]

and
2) the sequence of the Moderna COVID-19 vaccine is available, from, e.g., github. com/NAalytics/Assemblies-of-putative-SARS-CoV2-spike-encoding-mRNA-sequences-for-vaccines-BNT-162b2-and-mRNA-1273/blob/main/Assemblies%20of%20putative%20SARS-CoV2-spike-encoding%20mRNA%20sequences%20for%20vaccines%20BNT-162b2%20and%20mRNA-1273.docx.pdf.

[1011] Alternatively the sequence for the mRNA in the Pfizer-BioNTech COVID-19 vaccine, as available from github.com/NAalytics/Assemblies-of-putative-SARS-CoV2-spike-encoding-mRNA-sequences-for-vaccines-BNT-162b2-and-mRNA-1273/blob/main/Assemblies %20of % Oo20putative %20SARS-CoV2-spike-encoding %20mRNA %20sequences %20for %20vaccines %20BNT-162b2%20and %20mRNA-1273.docx.pdf, can be used.

[1012] The immunostimulatory bacteria provided herein also can encode antigens to protect against and/or to treat tick-borne and other insect-borne diseases, and other infectious agents, such as prions and malarial pathogens, such as Plasmodium falciparum, as well as bacterial and viral pathogens. The immunostimulatory bacteria also can be used as vaccines against bacterial and protozoan pathogens, including Plasmodium, C. difficile, and Listeria. Salmonella and other bacteria have been used for vaccines; any such known vaccine can be improved by encoding the antigen(s) in the immunostimulatory bacteria provided herein.

[1013] The immunostimulatory bacteria provided herein can induce immunity or an immune response to pathogens, particularly viral pathogens, resulting in effective antibody and T-cell responses. The immunostimulatory bacteria, such as the Salmonella bacteria, include genomic modifications so that they primarily or solely infect myeloid cells, and deliver plasmids that encode therapeutic products, such as antigens and antibodies, as well as additional immune-stimulating products that stimulate or induce an antiviral immune response. The immunostimulatory bacteria infect these antigen-presenting cells, where the encoded therapeutic product(s) are expressed.

[1014] The immunostimulatory bacteria can encode antigens, which result in the immune system of the host producing antibodies, including antibodies that recognize a virus or bacterium or other pathogen before it has infected a cell. The immunostimulatory bacteria for use as antivirals not only can encode antigens, but they can encode antibodies and immunostimulatory proteins to enhance a host's antiviral response. For use as vaccines, the immunostimulatory bacteria, by encoding antigens and other heterologous proteins, result in immunity or result in reduced severity of disease, or prevent the recurrence of persistent viral infections. Encoded antibodies include single-chain forms thereof, such as single-chain variable fragments (scFvs), nanobodies, and other such structures. The immunostimulatory properties of the bacteria, including those derived from encoding immunostimulatory proteins (described herein), such as STING, that enhance or promote an antiviral immune response, and also, the genomic modifications of the bacteria, such as the modifications that eliminate or reduce expression of asparaginase II, which enhance T-cell responses, result in a robust anti-pathogen therapeutic, including activation of type I IFN. As discussed herein, inactivated pathogen vaccines, such as the BCG vaccine for tuberculosis, can be improved by modifying the pathogen to inactivate or eliminate asparaginase activity. Asparaginase can reduce or inhibit the immune response to the vaccine; eliminating or reducing the activity of asparaginase can improve the effectiveness of a vaccine, such as the BCG vaccine.

### F. Constructing Exemplary Plasmids Encoding Therapeutic Products for Bacterial Delivery

[1015] The immunostimulatory bacteria herein can be modified to encode one or more therapeutic products, including immunomodulatory proteins, that promote, or induce, or enhance an anti-tumor response. The therapeutic product can be encoded on a plasmid in the bacterium, under the control of a eukaryotic promoter, such as a promoter recognized by RNA polymerase II, for expression in a eukaryotic subject, particularly the subject for whom the immunostimulatory bacterium is to be administered, such as a human. The nucleic acid encoding the therapeutic product(s) can include, in addition to the eukaryotic promoter, other regulatory signals for expression or trafficking in the cells, such as for secretion or expression on the surface of a cell. Immunostimulatory proteins are those that, in the appropriate environment, such as a tumor microenvironment (TME), can promote, or participate in, or enhance an anti-tumor response in the subject to whom the immunostimulatory bacterium is administered. Immunostimulatory proteins include, but are not limited to, cytokines, chemokines, and co-stimulatory molecules. These include cytokines, such as, but not limited to, IL-2, IL-7, IL-12, IL-12p70 (IL-12p40+IL-12p35), IL-15, IL-15/IL-15Rα chain complex, IL-18, IL-21, IL-23, IL-367, IL-2 that has attenuated binding to IL-2Ra, IL-2 that is modified so that it does not bind to IL-2Ra, IFN-α, and IFN-β; chemokines, such as, but not limited to, CCL3, CCL4, CCL5, CXCL9, CXCL10, and CXCL11; proteins that are involved in or that effect or potentiate the recruitment and/or persistence of T-cells; and/or co-stimulatory molecules, such as, but not limited to, CD40, CD40L, OX40, OX40L, 4-1BB, 4-1BBL, 4-1BBL with a deletion in the cytoplasmic domain (4-1BBLΔcyt), ICOS, ICOS ligand, CD27, CD27 ligand, CD80, CD86, members of the TNF/TNFR superfamily and members of the B7-CD28 family. Other such immunostimulatory proteins that are used for treatment of tumors or that can promote, enhance, or otherwise increase or evoke an anti-tumor response, known to those of skill in the art, are contemplated for encoding in the immunostimulatory bacteria provided herein.

[1016] Other therapeutic products, encoded by the immunostimulatory bacteria herein, include cytosolic DNA/RNA sensors that induce or activate type I interferon production, including STING, MDA5, RIG-I, IRF3, and IRF7, as well as gain-of-function and constitutively active variants thereof, and the chimeric STING polypeptides as described herein. For example, the constitutively active STING variants include those with the mutations V147L, N154S, V155M, C206Y, R281Q, and/or R284G, and combinations thereof, such as N154S/R284G, and others described herein and known in the art, while the constitutively active IRF3 variants include those with the mutations S396D, S398D, S402D, T404D, and/or S405D, and others described herein and known in the art. Other therapeutic products, encoded by the immunostimulatory bacteria herein, include antibodies and antibody fragments, including single-chain fragment variables (scFvs), Fab fragments, Fab′ fragments, F(ab′)₂ fragments, Fv fragments, disulfide-linked Fvs (dsFvs), Fd fragments, Fd′ fragments, single-chain Fabs (scFabs), diabodies, anti-idiotypic (anti-Id) antibodies, synthetic antibodies, recombinantly produced antibodies, multi-specific antibodies (e.g., bi-specific antibodies), human antibodies, non-human antibodies, humanized antibodies, chimeric antibodies, and intrabodies, or antigen-binding fragments of any of the above. The antibodies can be directed against immune checkpoints, such as PD-1, PD-L1, CTLA-4, IDO 1 and 2, CTNNB1 (β-catenin), SIRPα, VISTA, and TREX-1, and others known in the art or described herein, or can be directed against other targets, such as TGF-β, VEGF, HER2, EGFR, STAT3, and IL-6, and other such targets whose inhibition improves the anti-tumor response. The immunostimulatory bacteria also can encode RNAi, such as siRNA (shRNA and miRNA) against immune checkpoints, such as TREX1, and other targets whose inhibition, suppression, or disruption improves the anti-tumor response.

[1017] In some embodiments, the immunostimulatory bacteria herein are engineered to encode one or more cytokines to stimulate the immune system, including, but not limited to, IL-2, IL-7, IL-12 (IL-12p70 (IL-12p40+IL-12p35)), IL-15 (and the IL-15:IL-15R alpha chain complex (IL-15/IL-Rα)), IL-18, IL-21, IL-23, IL-36 gamma, IFN-alpha and IFN-beta. Cytokines stimulate immune effector cells and stromal cells at the tumor site, and enhance tumor cell recognition by cytotoxic cells. In some embodiments, the immunostimulatory bacteria can be engineered to encode chemokines, such as, for example, one or more of CCL3, CCL4, CCL5, CXCL9, CXCL10, and CXCL11. Complementary combinations of any of the therapeutic products can be encoded and delivered to the tumor microenvironment, to enhance the anti-tumor efficacy of the immunostimulatory bacteria. These modifications, and the immunostimulatory bacteria encoding them, are discussed above, and are exemplified below.

[1018] 1. Constitutive Promoters for Heterologous Expression of Proteins

[1019] Plasmids provided herein are designed to encode a therapeutic product, such as an immunostimulatory protein, that, when expressed in a mammalian subject, confers or contributes to anti-tumor immunity in the tumor microenvironment; the immunostimulatory protein or other therapeutic product is encoded on a plasmid in the bacterium under control of a eukaryotic promoter, such as a promoter that is recognized by RNA polymerase II (RNAP II). Generally, the promoter is a constitutive promoter, such as a late eukaryotic virus promoter. Exemplary promoters include, but are not limited to, a cytomegalovirus (CMV) promoter, an elongation factor-1 alpha (EF-1α) promoter, a ubiquitin C (UBC) promoter, a simian virus 40 (SV40) early promoter, a phosphoglycerate kinase 1 (PGK) promoter, a chicken β-actin (CBA) promoter and its derivative promoters CAGG or CAG, a β-glucuronidase (GUSB) promoter, the MND promoter (a synthetic promoter that contains the U3 region of a modified MoMuLV (Moloney murine leukemia virus) LTR with myeloproliferative sarcoma virus enhancer and deleted negative control region), a eukaryotic initiation factor 4A-I (eIF4A1) promoter, a CD68 promoter, and a GAPDH promoter, among others (see, e.g., Powell et al. (2015) Discov. Med. 19(102):49-57). The CAG promoter consists of: (C) the cytomegalovirus (CMV) early enhancer element; (A) the promoter, the first exon, and the first intron of chicken beta-actin gene; and (G) the splice acceptor of the rabbit beta-globin gene. MND is a synthetic promoter that contains the U3 region of a modified MoMuLV (Moloney murine leukemia virus) LTR with myeloproliferative sarcoma virus enhancer and deleted negative control region (murine leukemia virus-derived MND promoter (myeloproliferative sarcoma virus enhancer, negative control region deleted, dl587rev primer-binding site substituted); see, e.g., Li et al. (2010) J. Neurosci. Methods 189:56-64).

[1020] Two or more of these promoters can be encoded in multiple open reading frames (ORFs) on the plasmid. Certain promoters, including, but not limited to, CMV, contain multiple cAMP response element binding protein (CREB) sites. When plasmids containing these elements are released to the cytosol, for example those contained within S. typhimurium that are released into the cytosol following bacterial destruction, they can be efficiently shuttled to the nucleus using the CREB-mediated host microtubule machinery (see, e.g., Bai et al. (2017) Biosci. Rep. 37(6):BSR20160616).

[1021] The plasmids can include multiple promoters, including bacterial promoters, such as for expression of asd, and eukaryotic promoters for expression of therapeutic products. Various configurations of the promoters and other regulatory sequences have been assessed to improve expression of therapeutic products, and to improve bacterial growth and fitness. For example, among the configurations tested, reversing the orientation of the eukaryotic expression cassette on the plasmid, and inclusion of one or more bacterial terminators, can increase the efficiency of encoded payload expression, and can improve bacterial fitness.

[1022] 2. Multiple Therapeutic Product Expression Cassettes

[1023] a. Single Promoter Constructs

[1024] Expression of multiple genes in the same cell from a single construct can be achieved, and is advantageous when the co-expression of several proteins is required to elicit a desired biological effect, such as an anti-tumor response. Internal ribosome entry site (IRES) sequences have been used to separate two coding sequences under control of a single promoter, however, the expression level of the second protein can be reduced compared to the first protein, and the length of the IRES sequence can be prohibitive in certain cases, such as when using viruses with small packaging capacities. The discovery of short (˜18-22 amino acid long), virus-derived peptide sequences, known as 2A peptides, that mediate a ribosome-skipping event, enables the generation of multiple separate peptide products, at similar levels, from a single mRNA. The 2A peptide coding sequence is included between the polypeptide-encoding transgenes (see, e.g., Daniels et al. (2014) PLoS One 9(6):e100637).

[1025] IRES elements and 2A peptides use different mechanisms for co-expression of multiple genes in one transcript. For example, when using an IRES element to express multiple genes in one mRNA, the gene directly downstream of the promoter is translated by the canonical cap-dependent mechanism, and those downstream of the IRES element are translated by a cap-independent mechanism, which has a lower translation efficiency than the cap-dependent mechanism, resulting in unbalanced expression, with lower expression of the IRES-driven gene (see, e.g., Chng et al. (2015) mAbs 7(2):403-412). 2A linked genes, on the other hand, are translated in one open reading frame (ORF). The cleavage of proteins separated by a 2A sequence occurs co-translationally, in an unconventional process, where a peptide bond often fails to form (i.e., the peptide bond is “skipped”) between the C-terminal glycine and proline in the 2A peptide. Despite this, translation proceeds, and two distinct proteins are produced in equal amounts. A short stretch, coding for approximately 20 amino acids, of the 2A peptide sequence, is sufficient to cause the bond-skipping. If the bond skipping does not occur, however, a fusion protein is generated that will not subsequently cleave (see, e.g., Daniels et al. (2014) PLoS One 9(6):e100637).

[1026] Many of these 2A peptides have been described, including, but not limited to, T2A (see, e.g., SEQ ID NO:327) from Thosea asigna virus, P2A (see, e.g., SEQ ID NO:328) from porcine teschovirus-1, E2A (see, e.g., SEQ ID NO:329) from equine rhinitis A virus, and F2A (see, e.g., SEQ ID NO:330) from foot-and-mouth disease virus, among others. Different studies have reported conflicting cleavage efficiencies of the various 2A peptides, and the cleavage efficiency of a 2A peptide can be affected by the nature of the protein expressed, the order of genes flanking the 2A sequence, the length of the 2A peptide used, and the linker between the upstream protein and 2A peptide. Cleavage efficiency and enhanced protein expression can often be improved through the use of upstream viral cleavage sequences, such as, but not limited to, the peptide furin cleavage sequence, RRKR, as well as by inserting GSG and SGS peptide linkers, a V5 epitope tag (GKPUPNPLLGLDST), or a 3×Flag epitope tag immediately preceding the 2A (see, e.g., Chng et al. (2015) mAbs 7(2):403-412).

[1027] The immunostimulatory bacteria herein, containing plasmids encoding therapeutic products, such as immunomodulatory proteins, with a single promoter and ORF, can express two or more proteins through the use of viral internal ribosomal entry sites (IRES), which are cap-independent, or through translational read-through of 2A peptides, and subsequent self-cleavage into equally expressed co-proteins. The plasmids can contain other regulatory elements, as discussed below and elsewhere herein. For example, an exemplary construct (see, Example 14) is CMV-muIL-2 CO_T2A_muIFN-α2-WPRE, where codon optimized murine IL-2 is co-expressed with murine IFN-α2, using a CMV promoter, and a T2A peptide. Additionally, a Woodchuck Hepatitis Virus (WHP) Posttranscriptional Regulatory Element (WPRE) is included, to enhance expression. If, for example, a third therapeutic product is to be expressed by the plasmid, a 2A sequence is flanked by the first two proteins, which are expressed under the control of a first promoter, e.g., CMV, and a third protein is encoded under the control of a second promoter, e.g., EF-1α. Exemplary of such a construct is CMV-muIL-15Rα/ILL-15sc_T2A_muSTING-R283G+EF-1α-muIL-18-WPRE, where murine 15Rα/ILL-15sc, and murine STING with the replacement R283G or N153S/R283G (corresponding to R284G or N154S/R284G, respectively, in human STING) are co-expressed under control of a CMV promoter, using T2A, and murine IL-18 is expressed separately under control of an EF-1α promoter. This exemplary construct also includes a WPRE for enhanced expression.

[1028] As described herein, the immunostimulatory bacteria can be used as vaccines in which the encoded antigen(s) is/are expressed under control of a bacterial promoter for transcription in the bacterium, but include regulatory sequences, such as an IRES, that prevents translation in the bacterium, but facilitates or permits translation in the eukaryotic host, such as a human. Nucleic acid constructs encoding such antigens can optionally encode additional immune system/response enhancing proteins, such as a STING protein, and/or a cytokine, and/or other combinations, which in effect, act as adjuvants.

[1029] b. Dual/Multiple Promoter Constructs

[1030] Alternatively, the genetic payloads/therapeutic products can be expressed using dual or multiple promoter constructs, where each protein is expressed under the control of a separate promoter. Thus, plasmids encoding therapeutic products, such as immunomodulatory proteins, expressed in combinations, can contain multiple promoters, each controlling an individual intact ORF with proper stop codon processing (i.e., dual/multiple promoter constructs); or multiple proteins can be expressed in a single ORF through the use of 2A peptides (i.e., single promoter constructs); or the plasmid can contain a mixture of single and dual/multiple promoter constructs, to express three or more proteins, as described above.

[1031] 3. Regulatory Elements

[1032] a. Post-Transcriptional Regulatory Elements

[1033] In order to enhance expression of single and multiple therapeutic products/immunomodulatory proteins from a single plasmid, regulatory elements may be employed that enhance the transcription and translation of the protein(s) of interest. For example, the post-transcriptional regulatory element (PRE) of woodchuck hepatitis virus (WPRE), when inserted in the 3′ untranslated region of the ORF, can enhance expression levels several fold (see, e.g., Zufferey et al. (1999) J Virol. 73(4):2886-2892). Similarly, other such elements, including, but not limited to, the Hepatitis B Virus PRE (HPRE), also can enhance expression. The combination of these can be used at the 3′ ends of multiple ORFs to improve expression of multiple proteins on a single plasmid.

[1034] The PREs WPRE and HPRE are hepadnaviral cis-acting RNA elements that can increase the accumulation of cytoplasmic mRNA by promoting mRNA exportation from the nucleus, and can enhance post-transcriptional processing and stability.

[1035] b. Polyadenylation Signal Sequences and Terminators

[1036] Other elements on the plasmid that can enhance protein expression include polyadenylation signal sequences and terminators. Polyadenylation is the post-transcriptional addition of a poly(A) tail to the 3′ end of an mRNA transcript, which is part of the process that produces mature mRNA for translation. Polyadenylation signal sequences are important for nuclear export, mRNA stability, and efficient translation. A terminator is a sequence that defines the end of a transcript, creating a free 3′ end, and initiates the release of the newly synthesized mRNA from the transcriptional machinery. The free 3′ end is then available for the addition of the poly(A) tail. Terminators are found downstream of the gene to be transcribed, and typically occur directly after any 3′ regulatory elements, such as the polyadenylation or poly(A) signal. Commonly used mammalian terminators in expression plasmids include the simian virus 40 (SV40), human growth hormone (hGH), bovine growth hormone (BGH or bGH), and rabbit beta-globin (rbGlob) poly(A) sequences, that include the sequence motif AAUAAA (SEQ ID NO:398), and promote both polyadenylation and termination.

[1037] When placed at the 3′ end of the ORF, sequences such as the simian virus 40 poly A (SV40pA) or the bovine growth hormone poly A (bGHpA) signals, result in several-fold increased expression both in vitro and in vivo (see, e.g., Powell et al. (2015) Discov. Med. 19(102):49-57). These and other such elements can further enhance the expression and translation of multiple therapeutic products, including immunomodulatory proteins, expressed from a single plasmid.

[1038] c. Enhancers

[1039] Promoters and enhancers are found upstream of the multiple cloning site (MCS) in a plasmid, and cooperate to determine the rate of transcription. Enhancers are sequences that bind activator proteins, in order to loop the DNA, and bring a specific promoter to the initiation complex, thus increasing the rate of transcription. They can be adjacent to, or far from the promoter they influence, and include CMV, EF-1α, SV40, and synthetic enhancers, or the MND promoter, which is a synthetic promoter that contains the U3 region of a modified MoMuLV (Moloney murine leukemia virus) LTR with myeloproliferative sarcoma virus enhancer. The immunostimulatory bacteria herein contain plasmids that can comprise enhancer(s) to enhance the expression of the therapeutic products/proteins encoded on the plasmids.

[1040] d. Secretion Signals

[1041] A secretion signal, also known as a signal sequence or peptide, a leader sequence or peptide, or a localization signal or sequence, is a short peptide at the N-terminus of a newly synthesized protein that is to be secreted. Signal peptides promote a cell to translocate a protein, usually to the cellular membrane. The efficiency of protein secretion is strongly determined by the signal peptide. Thus, the immunostimulatory bacteria herein contain plasmids that can comprise a signal peptide/secretion signal peptide, to facilitate and/or increase the expression or secretion of the encoded therapeutic product(s).

[1042] e. Improving Bacterial Fitness

[1043] The plasmids in the immunostimulatory bacteria that encode the therapeutic products, include genes and regulatory elements that are provided for expression of bacterial genes, and also, for expression of complex polycistronic eukaryotic payloads. The switch between such evolutionarily divergent organisms introduces challenges for proper functioning in prokaryotes and eukaryotes. The bacteria are cultured in vitro, then administered to a eukaryotic subject, where the plasmids are delivered to cells, particularly to tumor-resident myeloid cells, in cancer subjects, where the payloads are expressed, processed and trafficked. Transcriptional leakiness from the eukaryotic promoter, such as the CMV promoter, in bacteria, combined with large eukaryotic genes and regulatory sequences, can result in reduced bacterial fitness that manifests as low injection stock viability, and reduced growth rate in broth culture.

[1044] 4. Origin of Replication and Plasmid Copy Number

[1045] Plasmids are autonomously-replicating, extra-chromosomal circular double-stranded DNA molecules that are maintained within bacteria by means of a replication origin. Copy number influences the plasmid stability. High copy number generally results in greater stability of the plasmid when the random partitioning occurs at cell division. A high copy number of plasmids generally decreases the growth rate, thus possibly allowing for bacterial cells with few plasmids to dominate the culture, since they grow faster. This can be ameliorated by using gene attenuation and gene dosing strategies, that limit the expression of certain genes on the plasmid that can be toxic to the bacteria when present in high copy numbers. The origin of replication also determines the plasmid's compatibility, i.e., its ability to replicate in conjunction with another plasmid within the same bacterial cell. Plasmids that utilize the same replication system cannot co-exist in the same bacterial cell; they are said to belong to the same compatibility group. The introduction of a new origin, in the form of a second plasmid from the same compatibility group, mimics the result of replication of the resident plasmid. Thus, any further replication is prevented until after the two plasmids have been segregated to different cells to create the correct pre-replication copy number.

[1046] Numerous bacterial origins of replication are known to those of skill in the art. The origin can be selected to achieve a desired copy number. Origins of replication contain sequences that are recognized as initiation sites of plasmid replication via DNA dependent DNA polymerases (see, e.g., del Solar et al. (1998) Microbiol. Mol. Biol. Rev. 62(2):434-464). Different origins of replication provide for varying plasmid copy levels within each cell, and can range from one to hundreds of copies per cell. Commonly used bacterial plasmid origins of replication include, but are not limited to, pMB1 derived origins, which have very high copy derivatives, such as pUC, and lower copy derivatives, such as pBR322, as well as ColE1, p15A, and pSC101, and other origins, which have low copy numbers. Such origins are well-known to those of skill in the art. For example, the pUC19 origin results in a copy number of 500-700 copies per cell. The pBR322 origin has a known copy number of 15-20 copies per cell. These origins only vary by a single base pair. The ColE1 origin copy number is 15-20, and derivatives, such as pBluescript, have copy numbers ranging from 300-500. The p15A origin that is in plasmid pACYC184, for example, results in a copy number of approximately 10. The pSC101 origins confer a copy number of approximately 5. Other low copy number vectors from which origins of replication can be obtained, include, for example, pWSK29, pWKS30, pWSK129, and pWKS130 (see, e.g., Wang et al. (1991) Gene 100:195-199). Medium to low copy number is less than 150, or less than 100. Low copy number is less than 20, 25, or 30. Generally, less than medium copy number is less than 150 copies, and less than low copy number is less than about 25 or less than 25 copies, and generally, copy number refers to the average copies of plasmid per bacterium in a preparation. Those of skill in the art can identify plasmids with low, medium, or high copy numbers. For example, one method to determine experimentally if the copy number is high or low is to perform a miniprep. A high-copy plasmid should yield between 3-5 μg DNA per 1 ml LB culture; a low-copy plasmid will yield between 0.2-1 μg DNA per ml of LB culture. Sequences of bacterial plasmids, including identification of and sequence of the origin of replication, are well known (see, e.g., snapgene.com/resources/plasmid_files/basic_cloning_vectors/pBR322/). Exemplary origins of replication, and their plasmid copy numbers, are summarized in the table below.

| Origin of Replication | Copy Number | SEQ ID NO. |
|---|---|---|
| pMB1 | Varies | 254 |
| p15A | 10-12 | 255 |
| pSC101 | ~5 | 256 |
| pBR322 | 15-20 | 243 |
| ColE1 | 15-20 | 257 |
| pPS10 | 15-20 | 258 |
| RK2 | ~5 | 259 |
| R6K (alpha origin) | 15-20 | 260 |
| R6K (beta origin) | 15-20 | 261 |
| R6K (gamma origin) | 15-20 | 262 |
| P1 (oriR) | Low | 263 |
| R1 | Low | 264 |
| pWSK | Low | 265 |
| ColE2 | 10-15 | 266 |
| pUC (pMB1) | 500-700 | 267 |
| F1 | 300-500 | 268 |

[1047] High copy plasmids are selected for heterologous expression of proteins in vitro, because the gene dosage is increased relative to chromosomal genes, there are higher specific yields of protein, and for therapeutic bacteria, higher therapeutic dosages of encoded therapeutics. It is shown, herein, however, that for delivery of plasmids encoding therapeutic products (e.g., immunomodulatory proteins), such as by S. typhimurium, in some embodiments, a high copy plasmid might be advantageous.

[1048] The requirement for bacteria to maintain the high copy plasmids can be a problem if the expressed molecule is toxic to the organism. The metabolic requirements for maintaining these plasmids can come at a cost of replicative fitness in vivo. Optimal plasmid copy number for delivery of therapeutic products can depend on the mechanism of attenuation of the strain engineered to deliver the plasmid. If needed, the skilled person, in view of the disclosure herein, can select an appropriate copy number for a particular immunostimulatory species and strain of bacteria.

[1049] For use as vaccines and/or to deliver RNA (such as mRNA) where the encoded products are expressed in the bacterium, the plasmid can be in higher or high copy number (greater than 150), to increase the amount of RNA or mRNA produced.

[1050] 5. CpG Motifs and CpG Islands

[1051] Unmethylated cytidine-phosphate-guanosine (CpG) motifs are prevalent in bacterial, but not in vertebrate, genomic DNA. Pathogenic DNA and synthetic oligodeoxynucleotides (ODNs) containing CpG motifs activate host defense mechanisms, leading to innate and acquired immune responses. The unmethylated CpG motifs contain a central unmethylated CG dinucleotide plus flanking regions. In humans, four distinct classes of CpG ODNs have been identified, based on differences in structure, and in the nature of the immune response they induce. K-type ODNs (also referred to as B-type) contain from 1 to 5 CpG motifs, typically on a phosphorothioate backbone. D-type ODNs (also referred to as A-type) have a mixed phosphodiester/phosphorothioate backbone and have a single CpG motif, flanked by palindromic sequences that permit the formation of a stem-loop structure, as well as poly G motifs at the 3′ and 5′ ends. C-type ODNs have a phosphorothioate backbone and contain multiple palindromic CpG motifs that can form stem loop structures or dimers. P-Class CpG ODNs have a phosphorothioate backbone, and contain multiple CpG motifs with double palindromes that can form hairpins at their GC-rich 3′ ends (see, e.g., Scheiermann et al. (2014) Vaccine 32(48):6377-6389). For purposes herein, the CpGs are encoded in the plasmid DNA; they can be introduced as a motif, or in a gene.

[1052] Toll-like receptors (TLRs) are key receptors for sensing pathogen-associated molecular patterns (PAMPs) and activating innate immunity against pathogens (see, e.g., Akira et al. (2001) Nat. Immunol. 2(8):675-680). TLR9 recognizes hypomethylated CpG motifs in the DNA of prokaryotes that do not occur naturally in mammalian DNA (see, e.g., McKelvey et al. (2011) J. Autoimmun. 36:76-86). Recognition of CpG motifs, upon phagocytosis of pathogens into endosomes in immune cell subsets, and activates innate and adaptive immunity.

[1053] Immunostimulatory bacteria, such as Salmonella species, such as S. typhimurium strains, carrying plasmids containing CpG islands or motifs, are provided herein. These bacteria can activate TLR9. As exemplified herein, bacterial plasmids that contain hypomethylated CpG islands can elicit innate and adaptive anti-tumor immune responses that, in combination with the therapeutic products encoded on the plasmid, such as immunostimulatory proteins and constitutively active variants of STING, IRF3, and other cytosolic DNA/RNA sensors, can have synergistic or enhanced anti-tumor activity. For example, the asd gene (see, e.g., SEQ ID NO:48) encodes a high frequency of hypomethylated CpG islands. CpG motifs can be included in combination with any of the therapeutic products, described or apparent from the description herein, in the immunostimulatory bacteria, to thereby enhance or improve anti-tumor immune responses in a treated subject.

[1054] Immunostimulatory CpGs can be included in the plasmids, by including a nucleic acid, typically from a bacterial gene, that encodes a gene product, and also by adding a nucleic acid that encodes CpG motifs. The plasmids herein can include CpG motifs. Exemplary CpG motifs are known (see, e.g., U.S. Pat. Nos. 8,232,259, 8,426,375, and 8,241,844). These include, for example, synthetic immunostimulatory oligonucleotides, that are between 10 and 100, 10 and 20, 10 and 30, 10 and 40, 10 and 50, or 10 and 75, base pairs long, with the general formula: (CpG)ₙ, where n is the number of repeats. Generally, at least one or two repeats are used; non-CG bases can be interspersed. Those of skill in the art are very familiar with the general use of CpG motifs for inducing an immune response by modulating TLRs, particularly TLR9.

[1055] 6. Plasmid Maintenance/Selection Components

[1056] The maintenance of plasmids in laboratory settings is usually ensured by the inclusion of an antibiotic resistance gene on the plasmid, and the use of antibiotics in the growth media. As described above, the use of an asd deletion mutant, complemented with a functional asd gene on the plasmid, allows for plasmid selection in vitro without the use of antibiotics, and allows for plasmid maintenance in vivo. The asd gene complementation system provides for such selection/maintenance (see, e.g., Galan et al. (1990) Gene 94(1):29-35). The use of the asd gene complementation system to maintain plasmids in the tumor microenvironment increases the potency of S. typhimurium and other immunostimulatory bacterial strains, engineered to deliver plasmids encoding therapeutic products, such as immunostimulatory proteins, constitutively active cytosolic DNA/RNA sensors, antibodies, antibody fragments, or other such products as discussed herein.

[1057] 7. DNA Nuclear Targeting Sequences

[1058] DNA nuclear targeting sequences (DTS), such as the SV40 DTS, mediate the translocation of DNA sequences through the nuclear pore complex. The mechanism of this transport is reported to be dependent on the binding of DNA binding proteins that contain nuclear localization sequences. The inclusion of a DTS on a plasmid to increase nuclear transport and expression has been demonstrated (see, e.g., Dean, D. A. et al. (1999) Exp. Cell Res. 253(2):713-722), and has been used to increase gene expression from plasmids delivered by S. typhimurium (see, e.g., Kong et al. (2012) Proc. Natl. Acad. Sci. U.S.A. 109(47):19414-19419).

[1059] Rho-independent or class I transcriptional terminators, such as the T1 terminator of the rrnB gene of E. coli, contain sequences of DNA that form secondary structures that cause dissociation of the transcription elongation complex. Transcriptional terminators are included in the plasmid in order to prevent expression of heterologous proteins by the S. typhimurium transcriptional machinery. This ensures that expression of the therapeutic products is confined to the host cell transcriptional machinery.

[1060] Plasmids used for transformation of Salmonella, such as S. typhimurium, as a cancer therapy described herein, contain all or some of the following attributes: 1) one or more constitutive promoters for heterologous expression of proteins; 2) one or more human immunomodulatory expression cassettes; 3) a bacterial origin of replication and optimized plasmid copy number; 4) immunostimulatory CpG islands; 5) an asd gene selectable marker for plasmid maintenance and selection; 6) DNA nuclear targeting sequences; and 7) transcriptional terminators.

### G. Exemplary Bacterial Strains and Mechanism of

[1061] Action for Use as Vaccines and Therapeutics As described throughout, provided are immunostimulatory bacteria that contain genome modifications that improve their properties for use as anti-cancer therapeutics, as vaccines against pathogens, and as delivery vehicles for RNA, which can be used for as therapeutic products, or, that, can be translated to provide immunostimulatory products, antigens, and combinations thereof for the various uses. The immunostimulatory bacteria include genomic modifications discussed throughout that improve their properties for use as anti-cancer therapeutics, for vaccines, and RNA delivery platforms, and also that reduce the inflammatory properties of bacteria, also include payloads, including combinations of payload products, that enhance or act with the properties of the bacteria for these applications. Payloads and genomic modifications are discussed and described throughout the disclosure herein, and are exemplified in the working examples below. The following is a discussion of exemplary bacteria, combinations of genomic modifications and payloads, and particularly advantageous for their use as vaccines. Disclosure throughout describes properties, payloads, and modifications for use as cancer therapeutics, and as therapeutics that are generally useful for appropriate immune stimulation or modulation for use for treating cancer and other diseases and conditions.

[1062] It is understood that the skilled artisan can effect similar genomic modifications in other bacterial species and strains, such as E. coli, and Listeria, to achieve similar effects and results. Additionally, as discussed above non-Salmonella species can be modified to encode a rck gene, such the rck gene from Salmonella, to increase resistance to complement.

[1063] For vaccination, the use and general mechanism of action for the bacteria provided herein includes administration, particularly direct tissue administration, such as by intramuscular injection, inhalation, intradermal administration, vaginal administration, and other such routes, to generate an in situ immune response to the antigen or product, which can be for prevention (immunization to develop an immmunoprotective response) or treatment, for a pathogen or for cancer. The bacteria induce durable adaptive antiviral immunity. The bacteria are suitably formulated for the selected route. This can include formulation, for example, as an aerosol, tablet, emulsion, powder, as appropriate. The so-formulated administered bacteria are taken up into tissue-resident phagocytes, by phagocytosis. For these purposes, the bacteria are modified so that they do no replicate in vivo, but deliver their payloads into the cells, such as tissue-resident phagocytic antigen-presenting cells (APCs). The encoded products include, for example antigens for presentation, STING to induce type I IFN. The encoded products can go into the lymph nodes resulting in antibodies via CD4+ and CD8+ priming, and the APCs present for priming and activation of antigen-specific CD8+ cells, which stimulate IFN-gamma, and also participate in direct killing of virally infected cells; macrophages phagocytose apoptotic infected cells, thereby spreading epitopes, which results in further T-cell activation

[1064] 1. Exemplary Immunostimulatory Bacteria—In Situ Cancer Vaccination Mechanism of Action (MOA)

[1065] Among the immunostimulatory bacteria provided herein are immunostimulatory bacteria that are designed to accumulate in tumor-resident myeloid cells, such as macrophage. These bacteria contain a plasmid that encodes immunostimulatory proteins and combinations thereof that induce an anti-viral/anti-tumor immune response. The genomic modifications include the elimination of flagella, alterations of the LPS, and elimination of curli fimbriae. These or modifications in bacterial strains with similar effects, reduce TLR2/4/5 responses/signaling, and result in accumulation in the tumor microenvironment and myeloid cells. Other modifications include auxotrophies, such as asd⁻ or thyA⁻ that render the bacteria unable to grow in vivo, and other auxotrophies, such as including purI⁻, that render the bacteria auxotrophic for adenosine, and other modifications that increase their accumulation in the tumor microenvironment, which can have elevated adenosine, which is immunosuppressive, and genomic modifications to eliminate or inactivate asparaginase, which can inhibit T cells. The combination of some or all of these bacterial modifications results in bacteria that accumulate in the macrophage in the tumor microenvironment and tumors. Exemplary of such immunostimulatory bacteria is the strain designated YS1646Δasd/ΔFLG/ΔpagP/ΔansB/ΔcsgD/F-ΔpurI strain. The strain can be used, for example, for in situ cancer antigen vaccination, where the strain contains a plasmid expressing either STING, eSTING (referring to engineered STING, such as those provided herein, particularly those that constitutively induce type I interferon), IL-15 (or IL-15 receptor complex)+eSTING, and other type I IFN producing combinations of payloads, expressed under control of a eukaryotic promoter, such as the CMV promoter. The plasmid additionally contains sequences encoding the open reading frames of full-length tumor antigens or peptide antigen fragments. The route of administration is IV, whereby the strain traffics to the tumor and is taken up by tumor-resident macrophages, resulting in plasmid transfer to the nucleus and expression of payloads. In the presence of type I IFN, the macrophages process and present the cancer antigens for CD8⁺ T-cell priming within the tumor, as well as trafficking to the lymph nodes to prime CD4⁺ and CD8⁺ T-cells. Primed and activated CD8⁺ T-cells eliminate tumor cells bearing the primed antigen, induce long-lived tissue-resident memory CD8⁺ T-cells, as well as circulating as memory T-cells after the tumor is cleared to prevent tumor recurrence.

[1066] 2. Exemplary immunostimulatory bacteria for Peripheral Cancer Vaccination and Mechanism of Action

[1067] The YS1646Δasd/ΔFLG/ΔpagP/ΔansB/ΔcsgD/F-ΔpurI/ΔthyA strain containing an additional thymidine auxotrophy is used for peripheral cancer antigen vaccination. The strain cannot proliferate in the absence of thymidine supplementation, and, upon administration, as by intramuscular injection into an extremity, it is phagocytosed by tissue-resident macrophages, such as following IM injection in the arm. The strain contains a plasmid that encodes STING, eSTING, IL-15+eSTING, or other type I IFN producing combination, as well as sequences of full-length tumor antigens or peptides, from either a bacterial promoter and IRES sequence or a eukaryotic promoter. For the bacterial promoter containing strains, the bacteria will then transcribe the RNA of these encoded payloads, and deliver them upon phagocytosis and destruction by tissue-resident macrophages. For the eukaryotic promoter containing strains, the phagocyte transcribes the RNA. The resulting mRNA the is translated into proteins, and the encoded antigens are presented by the macrophages in the presence of type I IFN for CD8⁺ T-cell priming. The cancer antigen-primed CD8⁺ T-cells circulate and eliminate cancerous cells, such as those that remain after surgical tumor resection. Strains such as this also are used as a prophylactic vaccine to reduce the risk of developing a particular cancer, such as for vaccination against familial genetic mutations that could lead to tumor formation.

[1068] 3. Exemplary Immunostimulatory Bacteria for Pathogen Vaccination and MOA

[1069] Also provided are bacterial strains that include additional auxotrophy, such as thyA⁻ strains. Exemplary of such include YS1646Δasd/ΔFLG/ΔpagP/ΔansB/ΔcsgD/F-ΔpurI/ΔthyA strain, which has an additional thymidine auxotrophy. Such strains cannot proliferate in the absence of thymidine supplementation. These strains can be used for vaccination against pathogens. They are administered by route that infection by the particular pathogen occurs naturally. Following administration, such as by intramuscular, intranasal, inhalation, or oral delivery, or combinations thereof, depending on the site or sites where the infection naturally occurs, they are cleared from tissue-resident macrophages, leaving plasmids. These strains contain a plasmid encoding an immunostimulatory protein or combination thereof, such as STING, engineered STING (eSTING), IL-15+eSTING, or other type I IFN producing proteins or combinations of proteins, and also pathogen sequences of antigens and/or peptides, under transcriptional control of a bacterial promoter, but including eukaryotic sequences, such as an IRES, for translation by eukaryotic ribosomes. The bacteria produce RNA encoding these payloads, and, after administration, upon phagocytosis and destruction by tissue-resident macrophages, deliver the encoded mRNA. The mRNA is translated into proteins by the eukaryotic host cells, and the antigens are presented by the macrophages in the presence of type I IFN for CD8⁺ T-cell priming. The type I IFN can be stimulated by the encoded immunostimulatory protein, such as a STING or modified STING. Additionally, the bacteria can provide the type I IFN and pathogen antigens as proteins using a plasmid with a bacterial promoter and sequences for bacterial transcription and translation. The macrophages then prime CD8⁺ T-cells in the tissue, as well as traffic to the lymph nodes to prime CD4⁺ and CD8⁺ T-cells. Primed and activated CD8⁺ T-cells then circulate as patrolling memory T-cells, as well as traffic back to the tissue of origin to remain as tissue-resident memory CD8⁺ T-cells. The primed CD4⁺ T-cells induce B-cell activation to produce high titers of durable neutralizing antibodies. This vaccination strategy mimics the highly successful smallpox, polio, measles, chicken pox, and other live-attenuated vaccines that are administered in the tissues where disease would naturally occur.

### H. Pharmaceutical Production, Compositions, and Formulations

[1070] Provided herein are methods for manufacturing, and pharmaceutical compositions and formulations, containing any of the immunostimulatory bacteria provided herein and pharmaceutically acceptable excipients or additives. The pharmaceutical compositions can be used in the treatment of diseases, such as hyperproliferative diseases or conditions, such as a tumor or cancer. The immunostimulatory bacteria can be administered as a single agent therapy, or can be administered in a combination therapy with a further agent(s) or treatment(s). Combination therapy includes combining therapy with the immunostimulatory bacteria and/or other delivery vehicles provided herein, with any other anti-cancer therapy or treatment, including, but not limited to, immunotherapies, such as CAR-T therapy and checkpoint inhibitors, radiation, surgery, chemotherapeutic agents, such as nucleoside analogs and platinum compounds, and cellular therapies. The compositions can be formulated for single dosage administration, or for multiple dosage administration. The agents can be formulated for direct administration. The compositions can be provided as a liquid or dried formulation.

[1071] 1. Manufacturing

[1072] a. Cell Bank Manufacturing

[1073] As the active ingredient of the immunotherapeutic described herein is composed of engineered self-replicating bacteria, the selected composition will be expanded into a series of cell banks that will be maintained for long-term storage and as the starting material for manufacturing of the drug substance. Cell banks are produced under current good manufacturing practices (cGMP) in an appropriate manufacturing facility per the Code of Federal Regulations (CFR) 21 part 211, or other relevant regulatory authority. As the active agent of the immunotherapeutic is a live bacterium, the products described herein are, by definition, non-sterile and cannot be terminally sterilized. Care must be taken to ensure that aseptic procedures are used throughout the manufacturing process to prevent contamination. As such, all raw materials and solutions must be sterilized prior to use in the manufacturing process.

[1074] A master cell bank (MCB) is produced by sequential serial single colony isolation of the selected bacterial strain, to ensure no contaminants are present in the starting material. A sterile culture vessel containing sterile media (can be complex media, e.g., LB or MSB, or defined media, e.g., M9 supplemented with appropriate nutrients) is inoculated with a single well-isolated bacterial colony and the bacteria are allowed to replicate, e.g., by incubation at 37° C. with shaking. The bacteria are then prepared for cryopreservation by suspension in a solution containing a cryoprotective agent or agents.

[1075] Examples of cryoprotective agents include: proteins, such as human or bovine serum albumin, gelatin, and immunoglobulins; carbohydrates, including monosaccharides (e.g., galactose, D-mannose, sorbose, etc.) and their non-reducing derivatives (e.g., methylglucoside), disaccharides (e.g., trehalose, sucrose, and others), cyclodextrins, and polysaccharides (e.g., raffinose, maltodextrins, dextrans, etc.); amino-acids (e.g., glutamate, glycine, alanine, arginine or histidine, tryptophan, tyrosine, leucine, phenylalanine, etc.); methylamines, such as betaine; polyols, such as trihydric or higher sugar alcohols, e.g., glycerin, erythritol, glycerol, arabitol, xylitol, sorbitol, and mannitol; propylene glycol; polyethylene glycol; surfactants, e.g., Pluronic®; or organo-sulfur compounds, such as dimethyl sulfoxide (DMSO), and combinations thereof. Cryopreservation solutions can include one or more cryoprotective agents in a solution that also can contain salts (e.g., sodium chloride, potassium chloride, magnesium sulfate), and/or buffering agents, such as sodium phosphate, tris(hydroxymethyl)aminomethane (TRIS), 4-(2-hydroxyethyl)-1-piperazineethanesulfonic acid (HEPES), and other such buffering agents known to those of skill in the art.

[1076] Suspension of the bacteria in cryopreservation solution can be achieved either by addition of a concentrated cryoprotective agent or agents to the culture material to achieve a final concentration that preserves viability of the bacteria during the freezing and thawing process (e.g., 0.5% to 20% final concentration of glycerol), or by harvesting the bacteria (e.g., by centrifugation) and suspending in a cryopreservative solution containing the appropriate final concentration of cryoprotective agent(s). The suspension of bacteria in cryopreservation solution is then filled into appropriate sterile vials (plastic or glass) with a container closure system that is capable of maintaining closure integrity under frozen conditions (e.g., butyl stoppers and crimp seals). The vials of master cell bank are then frozen (either slowly by means of a controlled rate freezer, or quickly by means of placing directly into a freezer). The MCB is then stored frozen at a temperature that preserves long-term viability (e.g., at or below −60° C.). Thawed master cell bank material is thoroughly characterized to ensure identity, purity, and activity per regulation by the appropriate authorities.

[1077] Working cell banks (WCBs) are produced much the same way as the master cell bank, but the starting material is derived from the MCB. MCB material can be directly transferred into a fermentation vessel containing sterile media and expanded as above. The bacteria are then suspended in a cryopreservation solution, filled into containers, sealed, and frozen at or below −20° C. Multiple WCBs can be produced from MCB material, and WCB material can be used to make additional cell banks (e.g., a manufacturer's working cell bank (MWCB)). WCBs are stored frozen, and are characterized to ensure identity, purity, and activity. WCB material is typically the starting material used in the production of the drug substance of biologics such as engineered bacteria.

[1078] b. Drug Substance Manufacturing

[1079] Drug substance is manufactured using aseptic processes under cGMP, as described above. Working cell bank material is typically used as starting material for manufacturing of drug substance under cGMP, however, other cell banks can be used (e.g., MCB or MWCB). Aseptic processing is used for production of all cell therapies including bacterial cell-based therapies. The bacteria from the cell bank are expanded by fermentation; this can be achieved by production of a pre-culture (e.g., in a shake flask), or by direct inoculation of a fermenter. Fermentation is accomplished in a sterile bioreactor or flask that can be single-use disposable, or re-usable. Bacteria are harvested by concentration (e.g., by centrifugation, continuous centrifugation, or tangential flow filtration). Concentrated bacteria are purified from media components and bacterial metabolites by exchange of the media with buffer (e.g., by diafiltration). The bulk drug product is formulated and preserved as an intermediate (e.g., by freezing or drying), or is processed directly into a drug product. Drug substance is tested for identity, strength, purity, potency, and quality.

[1080] c. Drug Product Manufacturing

[1081] Drug product is defined as the final formulation of the active substance contained in its final container. Drug product is manufactured using aseptic processes under cGMP. Drug product is produced from drug substance. Drug substance is thawed or reconstituted if necessary, then formulated at the appropriate target strength. Because the active component of the drug product is live, engineered bacteria, the strength is determined by the number of colony forming units (CFUs) contained within the suspension. The bulk product is diluted in a final formulation appropriate for storage and use, as described below. Containers are filled and sealed with a container closure system, and the drug product is labeled. The drug product is stored at an appropriate temperature to preserve stability and is tested for identity, strength, purity, potency, and quality, and released for human use if it meets specified acceptance criteria.

[1082] 2. Compositions

[1083] Pharmaceutically acceptable compositions are prepared in view of approvals for a regulatory agency or other agency, and/or prepared in accordance with generally recognized pharmacopeia for use in animals and in humans. The compositions can be prepared as solutions, suspensions, powders, or sustained release formulations. Typically, the compounds are formulated into pharmaceutical compositions using techniques and procedures well-known in the art (see, e.g., Ansel, Introduction to Pharmaceutical Dosage Forms, Fourth Edition, 1985, page 126). The formulation should suit the mode of administration.

[1084] Compositions can be formulated for administration by any route known to those of skill in the art, including intramuscular, intravenous, intradermal, intralesional, intraperitoneal, subcutaneous, intratumoral, epidural, nasal, oral, vaginal, rectal, topical, local, otic, inhalational, buccal (e.g., sublingual), and transdermal administration, or by any suitable route. Other modes of administration also are contemplated. Administration can be local, topical, or systemic, depending upon the locus of treatment. Local administration to an area in need of treatment can be achieved by, for example, but not limited to, local infusion during surgery, topical application, e.g., in conjunction with a wound dressing after surgery, by injection, by means of a catheter, by means of a suppository, or by means of an implant. Compositions also can be administered with other biologically active agents, either sequentially, intermittently, or in the same composition. Administration also can include controlled release systems, including controlled release formulations and device controlled release, such as by means of a pump.

[1085] The most suitable route in any given case depends on a variety of factors, such as the nature of the disease, the progress of the disease, the severity of the disease, and the particular composition which is used. Pharmaceutical compositions can be formulated in dosage forms appropriate for each route of administration. In particular, the compositions can be formulated into any suitable pharmaceutical preparations for systemic, local, intraperitoneal, oral, or direct administration. For example, the compositions can be formulated for administration subcutaneously, intramuscularly, intratumorally, intravenously, or intradermally. Administration methods can be employed to decrease the exposure of the active agent to degradative processes, such as immunological intervention via antigenic and immunogenic responses. Examples of such methods include local administration at the site of treatment, or continuous infusion.

[1086] The immunostimulatory bacteria can be formulated into suitable pharmaceutical preparations, such as solutions, suspensions, tablets, dispersible tablets, pills, capsules, powders, sustained release formulations, or elixirs, for oral administrations, as well as transdermal patch preparations, and dry powder inhalers. Typically, the compounds are formulated into pharmaceutical compositions using techniques and procedures well-known in the art (see, e.g., Ansel, Introduction to Pharmaceutical Dosage Forms, Fourth Edition, 1985, page 126). Generally, the mode of formulation is a function of the route of administration. The compositions can be formulated in dried (lyophilized or other forms of vitrification) or liquid form. Where the compositions are provided in dried form, they can be reconstituted just prior to use by addition of an appropriate buffer, for example, a sterile saline solution.

[1087] 3. Formulations

[1088] a. Liquids, Injectables, Emulsions

[1089] The formulation generally is made to suit the route of administration. Parenteral administration, generally characterized by injection or infusion, either subcutaneously, intramuscularly, intratumorally, intravenously, or intradermally is contemplated herein. Preparations of bacteria for parenteral administration include suspensions ready for injection (direct administration), frozen suspensions that are thawed prior to use, dry soluble products, such as lyophilized powders, ready to be combined with a resuspension solution just prior to use, and emulsions. Dried thermostable formulations, such as lyophilized formulations, can be used for storage of unit doses for later use.

[1090] The pharmaceutical preparation can be in a frozen liquid form, for example, a suspension. If provided in frozen liquid form, the drug product can be provided as a concentrated preparation to be thawed and diluted to a therapeutically effective concentration before use.

[1091] The pharmaceutical preparations also can be provided in a dosage form that does not require thawing or dilution for use. Such liquid preparations can be prepared by conventional means with pharmaceutically acceptable additives, as appropriate, such as suspending agents (e.g., sorbitol, cellulose derivatives, or hydrogenated edible fats); emulsifying agents (e.g., lecithin or acacia); non-aqueous vehicles (e.g., almond oil, oily esters, or fractionated vegetable oils); and preservatives suitable for use with microbial therapeutics. The pharmaceutical preparations can be presented in dried form, such as lyophilized or spray-dried, for reconstitution with water or other sterile suitable vehicle before use.

[1092] Suitable excipients are, for example, water, saline, dextrose, or glycerol. The solutions can be either aqueous or non-aqueous. If administered intravenously, suitable carriers include physiological saline or phosphate buffered saline (PBS), and other buffered solutions used for intravenous hydration. For intratumoral administration, solutions containing thickening agents, such as glucose, polyethylene glycol, and polypropylene glycol, oil emulsions, and mixtures thereof can be appropriate to maintain localization of the injectant.

[1093] Pharmaceutical compositions can include carriers or other excipients. For example, pharmaceutical compositions provided herein can contain any one or more of a diluents(s), adjuvant(s), antiadherents(s), binder(s), coating(s), filler(s), flavor(s), color(s), lubricant(s), glidant(s), preservative(s), detergent(s), or sorbent(s), and a combination thereof, or a vehicle with which a modified therapeutic bacteria is administered. For example, pharmaceutically acceptable carriers or excipients used in parenteral preparations include aqueous vehicles, non-aqueous vehicles, isotonic agents, buffers, antioxidants, local anesthetics, suspending and dispersing agents, emulsifying agents, sequestering or chelating agents, and other pharmaceutically acceptable substances. Formulations, including liquid preparations, can be prepared by conventional means with pharmaceutically acceptable additives or excipients.

[1094] Pharmaceutical compositions can include carriers, such as a diluent, adjuvant, excipient, or vehicle, with which the compositions are administered. Examples of suitable pharmaceutical carriers are described in “Remington's Pharmaceutical Sciences” by E. W. Martin. Such compositions will contain a therapeutically effective amount of the compound or agent, generally in purified form or partially purified form, together with a suitable amount of carrier, so as to provide the form for proper administration to the patient. Such pharmaceutical carriers can be sterile liquids, such as water and oils, including those of petroleum, animal, vegetable, or synthetic origin, such as peanut oil, soybean oil, mineral oil, and sesame oil. Water is a typical carrier. Saline solutions and aqueous dextrose and glycerol solutions also can be employed as liquid carriers, particularly for injectable solutions. Compositions can contain along with an active ingredient: a diluent, such as lactose, sucrose, dicalcium phosphate, or carboxymethylcellulose; a lubricant, such as magnesium stearate, calcium stearate, and talc; and a binder, such as starch, natural gums, such as gum acacia, gelatin, glucose, molasses, polyvinylpyrrolidine, celluloses and derivatives thereof, povidone, crospovidone, and other such binders known to those of skill in the art. Suitable pharmaceutical excipients include starch, glucose, lactose, sucrose, gelatin, malt, rice, flour, chalk, silica gel, sodium stearate, glycerol monostearate, talc, sodium chloride, dried skim milk, glycerol, propylene, glycol, water, and ethanol. For example, suitable excipients are, for example, water, saline, dextrose, glycerol, or ethanol. A composition, if desired, also can contain other minor amounts of non-toxic auxiliary substances, such as wetting or emulsifying agents, pH buffering agents, stabilizers, solubility enhancers, and other such agents, such as, for example, sodium acetate, sorbitan monolaurate, triethanolamine oleate, and cyclodextrins.

[1095] Pharmaceutically acceptable carriers used in parenteral preparations include aqueous vehicles, non-aqueous vehicles, antimicrobial agents, isotonic agents, buffers, antioxidants, local anesthetics, suspending and dispersing agents, emulsifying agents, sequestering or chelating agents and other pharmaceutically acceptable substances. Examples of aqueous vehicles include Sodium Chloride Injection, Ringer's Injection, Isotonic Dextrose Injection, Sterile Water Injection, and Dextrose and Lactated Ringer's Injection. Non-aqueous parenteral vehicles include fixed oils of vegetable origin, cottonseed oil, corn oil, sesame oil, and peanut oil. Isotonic agents include sodium chloride and dextrose. Buffers include phosphate and citrate. Antioxidants include sodium bisulfate. Local anesthetics include procaine hydrochloride. Suspending and dispersing agents include sodium carboxymethylcellulose, hydroxypropyl methylcellulose, and polyvinylpyrrolidone. Emulsifying agents include, for example, polysorbates, such Polysorbate 80 (TWEEN 80). Sequestering or chelating agents of metal ions, such as EDTA, can be included. Pharmaceutical carriers also include polyethylene glycol, and propylene glycol for water miscible vehicles, and sodium hydroxide, hydrochloric acid, citric acid, or lactic acid, for pH adjustment. Non-anti-microbial preservatives can be included.

[1096] The pharmaceutical compositions also can contain other minor amounts of non-toxic auxiliary substances, such as wetting or emulsifying agents, pH buffering agents, stabilizers, solubility enhancers, and other such agents, such as, for example, sodium acetate, sorbitan monolaurate, triethanolamine oleate, and cyclodextrins. Implantation of a slow-release or sustained-release system, such that a constant level of dosage is maintained (see, e.g., U.S. Pat. No. 3,710,795), also is contemplated herein. The percentage of active compound contained in such parenteral compositions is highly dependent on the specific nature thereof, as well as the activity of the compound and the needs of the subject.

[1097] b. Dried Thermostable Formulations

[1098] The bacteria can be dried. Dried thermostable formulations, such as lyophilized or spray dried powders and vitrified glass, can be reconstituted for administration as solutions, emulsions and other mixtures. The dried thermostable formulations can be prepared from any of the liquid formulations, such as the suspensions, described above. The pharmaceutical preparations can be presented in lyophilized or vitrified form, for reconstitution with water or other suitable vehicle, before use.

[1099] The thermostable formulation is prepared for administration by reconstituting the dried compound with a sterile solution. The solution can contain an excipient which improves the stability or other pharmacological attribute of the active substance or reconstituted solution, prepared from the powder. The thermostable formulation is prepared by dissolving an excipient, such as dextrose, sorbitol, fructose, corn syrup, xylitol, glycerin, glucose, sucrose, or other suitable agent, in a suitable buffer, such as citrate, sodium or potassium phosphate, or other such buffer known to those of skill in the art. Then, the drug substance is added to the resulting mixture, and stirred until it is mixed. The resulting mixture is apportioned into vials for drying. Each vial will contain a single dosage, containing 1×10⁵ to 1×10¹¹ CFUs per vial. After drying, the product vial is sealed with a container closure system that prevents moisture or contaminants from entering the sealed vial. The dried product can be stored under appropriate conditions, such as at −20° C., 4° C., or room temperature. Reconstitution of this dried formulation with water or a buffer solution provides a formulation for use in parenteral administration. The precise amount depends upon the indication treated and selected compound. Such amount can be empirically determined.

[1100] 4. Compositions for Other Routes of Administration

[1101] Depending upon the condition treated, other routes of administration in addition to parenteral, such as topical application, transdermal patches, and oral and rectal administration, also are contemplated herein. The suspensions and powders described above can be administered orally, or can be reconstituted for oral administration. Pharmaceutical dosage forms for rectal administration are rectal suppositories, capsules, and tablets and gel capsules for systemic effect. Rectal suppositories include solid bodies for insertion into the rectum which melt or soften at body temperature, releasing one or more pharmacologically or therapeutically active ingredients. Pharmaceutically acceptable substances in rectal suppositories are bases or vehicles and agents to raise the melting point. Examples of bases include cocoa butter (theobroma oil), glycerin-gelatin, CARBOWAX® (polyethylene glycol), and appropriate mixtures of mono-, di-, and triglycerides of fatty acids. Combinations of the various bases can be used. Agents to raise the melting point of suppositories include spermaceti and wax. Rectal suppositories can be prepared either by the compressed method, or by molding. The typical weight of a rectal suppository is about 2 to 3 grams. Tablets and capsules for rectal administration are manufactured using the same pharmaceutically acceptable substance and by the same methods as for formulations for oral administration. Formulations suitable for rectal administration can be provided as unit dose suppositories. These can be prepared by admixing the drug substance with one or more conventional solid carriers, for example, cocoa butter, and then shaping the resulting mixture.

[1102] For oral administration, pharmaceutical compositions can take the form of, for example, tablets or capsules prepared by conventional means with pharmaceutically acceptable excipients, such as binding agents (e.g., pregelatinized maize starch, polyvinyl pyrrolidone, or hydroxypropyl methylcellulose); fillers (e.g., lactose, microcrystalline cellulose, or calcium hydrogen phosphate); lubricants (e.g., magnesium stearate, talc, or silica); disintegrants (e.g., potato starch or sodium starch glycolate); or wetting agents (e.g., sodium lauryl sulfate). The tablets can be coated by methods well-known in the art.

[1103] Formulations suitable for buccal (sublingual) administration include, for example, lozenges containing the active compound in a flavored base, usually sucrose and acacia or tragacanth; and pastilles containing the compound in an inert base, such as gelatin and glycerin, or sucrose and acacia.

[1104] Topical mixtures are prepared as described for local and systemic administration. The resulting mixtures can be solutions, suspensions, emulsions or the like, and are formulated as creams, gels, ointments, emulsions, solutions, elixirs, lotions, suspensions, tinctures, pastes, foams, aerosols, irrigations, sprays, suppositories, bandages, dermal patches, or any other formulations suitable for topical administration.

[1105] The compositions can be formulated as aerosols for topical application, such as by inhalation (see, e.g., U.S. Pat. Nos. 4,044,126, 4,414,209, and 4,364,923, which describe aerosols for the delivery of a steroid useful for treatment of lung diseases). These formulations, for administration to the respiratory tract, can be in the form of an aerosol or solution for a nebulizer, or as a microfine powder for insufflation, alone or in combination with an inert carrier such as lactose. In such a case, the particles of the formulation will typically have diameters of less than 50 microns, or less than 10 microns.

[1106] The compounds can be formulated for local or topical application, such as for topical application to the skin and mucous membranes, such as in the eye, in the form of gels, creams, and lotions, and for application to the eye, or for intracisternal or intraspinal application. Topical administration is contemplated for transdermal delivery, and also for administration to the eyes or mucosa, or for inhalation therapies. Nasal solutions of the active compound alone, or in combination with other pharmaceutically acceptable excipients, also can be administered.

[1107] Formulations suitable for transdermal administration are provided. They can be provided in any suitable format, such as discrete patches adapted to remain in intimate contact with the epidermis of the recipient for a prolonged period of time. Such patches contain the active compound in an optionally buffered aqueous solution of, for example, 0.1 to 0.2 M concentration, with respect to the active compound. Formulations suitable for transdermal administration also can be delivered by iontophoresis (see, e.g., Tyle, P. (1986) Pharmaceutical Research 3(6):318-326), and typically take the form of an optionally buffered aqueous solution of the active compound.

[1108] Pharmaceutical compositions also can be administered by controlled release formulations and/or delivery devices (see e.g., U.S. Pat. Nos. 3,536,809; 3,598,123; 3,630,200; 3,845,770; 3,916,899; 4,008,719; 4,769,027; 5,059,595; 5,073,543; 5,120,548; 5,591,767; 5,639,476; 5,674,533; and 5,733,566).

[1109] 5. Dosages and Administration

[1110] The compositions can be formulated as pharmaceutical compositions for single dosage or multiple dosage administration. The immunostimulatory bacteria can be included in an amount sufficient to exert a therapeutically useful effect in the absence of undesirable side effects on the patient treated. For example, the concentration of the pharmaceutically active compound is adjusted so that an injection provides an effective amount to produce the desired pharmacological effect. The therapeutically effective concentration can be determined empirically by testing the immunostimulatory bacteria in known in vitro and in vivo systems, such as by using the assays described herein or known in the art. For example, standard clinical techniques can be employed. In vitro assays and animal models can be employed to help identify optimal dosage ranges. The precise dose, which can be determinied empirically, can depend on the age, weight, body surface area, and condition of the patient or animal, the particular immunostimulatory bacteria administered, the route of administration, the type of disease to be treated, and the seriousness of the disease.

[1111] Hence, it is understood that the precise dosage and duration of treatment is a function of the disease being treated, and can be determined empirically using known testing protocols, or by extrapolation from in vivo or in vitro test data. Concentrations and dosage values also can vary with the severity of the condition to be alleviated. It is to be further understood that, for any particular subject, specific dosage regimens should be adjusted over time according to the individual need and the professional judgment of the person administering or supervising the administration of the compositions, and that the concentration ranges set forth herein are exemplary only and are not intended to limit the scope or use of compositions and combinations containing them. The compositions can be administered hourly, daily, weekly, monthly, yearly, or once. Generally, dosage regimens are chosen to limit toxicity. It should be noted that the attending physician would know how to and when to terminate, interrupt, or adjust therapy to lower dosage due to toxicity, or bone marrow, liver, or kidney, or other tissue dysfunctions. Conversely, the attending physician would also know how to and when to adjust treatment to higher levels if the clinical response is not adequate (precluding toxic side effects).

[1112] The immunostimulatory bacteria are included in the composition in an amount sufficient to exert a therapeutically useful effect. For example, the amount is one that achieves a therapeutic effect in the treatment of a hyperproliferative disease or condition, such as cancer, or an amount that is effective as a vaccine, or to deliver mRNA. An exemplary dose can be about 1×10⁹ CFUs/m², but depends upon the route of administration. As shown in the table below, and noted above, higher doses can be administered. The data below, from an experiment in a mouse model, show that strains with the genome modifications as described herein have significantly improved tolerability, at least about 15-fold, compared to strain VNP20009, and, thus, can be dosed in higher amounts.

| | | | | Fold | Human |
|---|---|---|---|---|---|
| | | LD₅₀ in | Fold | Improvedvs, | Equivalent |
| Strain Name | Strain Genotype | BALB/c Mice | Attenuated | VNP2009 | Dose (CFU/m²) |
| VNP20009 | ΔpurI + ΔmsbB | 4.4E6 | ~44,000 | — | 6.33E+08 |
| ΔFLG | ΔpurI + ΔmsbB + | 2.0E7 | 200,000 | 4.5 | 2.88E+09 |
| | ΔasdA + ΔFLG | | | | |
| ΔpagP | ΔpurI + ΔmsbB + | 1.4E7 | 139,000 | 3.2 | 2.00E+09 |
| | ΔasdA + ΔpagP | | | | |
| ΔFLG/ΔpagP | ΔpurI + ΔmsbB + | >6.2E7 | >620,000 | >14 | >8.91E+09 |
| | ΔasdA + ΔPLG + | | | | |
| | ΔpagP | | | | |

[1113] The immunostimulatory bacteria described and provided herein can be administered by any suitable route, including, but not limited to, intravenously (IV), and mucosally, such as by nasal/intranasal administration, and by inhalation into the lung. This is particularly advantageous in embodiments in which the bacteria are used as vaccines against pathogens, such as bacterial and viral pathogens, including, for example, severe acute respiratory syndrome coronavirus 2 (SARS-CoV-2). The bacteria can be provided as a tablet, powder, or liquid, or other suitable formulation; they can be stored frozen, or refrigerated, or stored at room temperature, depending upon the formulation. Thus, the bacteria that provide mRNA can be administered via a variety of routes, and can be conveniently stored and formulated.

[1114] Pharmaceutically and therapeutically active compounds and derivatives thereof are typically formulated and administered in unit dosage forms or multiple dosage forms. Each unit dose contains a predetermined quantity of therapeutically active compound sufficient to produce the desired therapeutic effect, in association with the required pharmaceutical carrier, vehicle, or diluent. Unit dosage forms, include, but are not limited to, tablets, capsules, pills, powders, granules, parenteral suspensions, oral solutions or suspensions, and oil-in-water emulsions, containing suitable quantities of the compounds or pharmaceutically acceptable derivatives thereof. Unit dose forms can be contained in vials, ampoules and syringes, or individually packaged tablets or capsules. Unit dose forms can be administered in fractions or multiples thereof. A multiple dose form is a plurality of identical unit dosage forms packaged in a single container to be administered in segregated unit dose form. Examples of multiple dose forms include vials, bottles of tablets or capsules, or bottles of pints or gallons. Hence, multiple dose form is a multiple of unit doses that are not segregated in packaging. Generally, dosage forms or compositions containing active ingredient in the range of 0.005% to 100%, with the balance made up from non-toxic carrier, can be prepared. Pharmaceutical compositions can be formulated in dosage forms appropriate for each route of administration.

[1115] The unit-dose parenteral preparations are packaged in an ampoule, a vial, or a syringe with a needle. The volume of liquid solution or reconstituted powder preparation, containing the pharmaceutically active compound, is a function of the disease to be treated and the particular article of manufacture chosen for package. All preparations for parenteral administration must be sterile, as is known and practiced in the art.

[1116] As indicated, compositions provided herein can be formulated for any route known to those of skill in the art, including, but not limited to, subcutaneous, intramuscular, intravenous, intradermal, intralesional, intraperitoneal, epidural, vaginal, rectal, local, otic, or transdermal administration, or any route of administration. Formulations suited for such routes are known to one of skill in the art. Compositions also can be administered with other biologically active agents, either sequentially, intermittently, or in the same composition.

[1117] Pharmaceutical compositions can be administered by controlled release formulations and/or delivery devices (see, e.g., U.S. Pat. Nos. 3,536,809; 3,598,123; 3,630,200; 3,845,770; 3,847,770; 3,916,899; 4,008,719; 4,687,660; 4,769,027; 5,059,595; 5,073,543; 5,120,548; 5,354,556; 5,591,767; 5,639,476; 5,674,533; and 5,733,566). Various delivery systems are known and can be used to administer selected compositions, are contemplated for use herein, and such particles can be easily made.

[1118] 6. Packaging and Articles of Manufacture

[1119] Also provided are articles of manufacture containing packaging materials, any pharmaceutical composition provided herein, and a label that indicates that the compositions are to be used for treatment of diseases or conditions as described herein. For example, the label can indicate that the treatment is for a tumor or for cancer.

[1120] Combinations of immunostimulatory bacteria described herein and another therapeutic agent also can be packaged in an article of manufacture. In one example, the article of manufacture contains a pharmaceutical composition containing the immunostimulatory bacteria composition and no further agent or treatment. In other examples, the article of manufacture contains another further therapeutic agent, such as a different anti-cancer agent. In this example, the agents can be provided together or separately, for packaging as articles of manufacture.

[1121] The articles of manufacture provided herein contain packaging materials. Packaging materials for use in packaging pharmaceutical products are well-known to those of skill in the art. See, for example, U.S. Pat. Nos. 5,323,907, 5,052,558, and 5,033,252, each of which is incorporated herein in its entirety. Examples of pharmaceutical packaging materials include, but are not limited to, blister packs, bottles, tubes, inhalers, pumps, bags, vials, containers, syringes, bottles, and any packaging material suitable for a selected formulation and intended mode of administration and treatment. Exemplary of articles of manufacture are containers, including single chamber and dual chamber containers. The containers include, but are not limited to, tubes, bottles, and syringes. The containers can further include a needle for intravenous administration.

[1122] The choice of package depends on the agents, and whether such compositions will be packaged together or separately. In general, the packaging is non-reactive with the compositions contained therein. In other examples, some of the components can be packaged as a mixture. In other examples, all components are packaged separately. Thus, for example, the components can be packaged as separate compositions that, upon mixing just prior to administration, can be directly administered together. Alternatively, the components can be packaged as separate compositions for administration separately.

[1123] Selected compositions including articles of manufacture thereof also can be provided as kits. Kits can include a pharmaceutical composition described herein, and an item for administration provided as an article of manufacture. The compositions can be contained in the item for administration or can be provided separately to be added later. The kit can, optionally, include instructions for application, including dosages, dosing regimens, and instructions for modes of administration. Kits also can include a pharmaceutical composition described herein and an item for diagnosis.

### I. Methods of Treatment and Uses

[1124] The methods provided herein include methods of administering or using the immunostimulatory bacteria, for treating subjects having a disease or condition whose symptoms can be ameliorated or lessened by administration of such bacteria, such as cancer. In particular examples, the disease or condition is a tumor or a cancer. Bacteria provided herein also can be used as vaccines and other such applications, discussed in sections above. In those instances, not only can the bacteria be administered as described in this section, as described with reference to their use as anti-cancer agents, but also by other routes that mimic the natural routes of entry of various pathogens. For example, as discussed in the above sections, for vaccination, such as against viruses, such as respiratory viruses, they can be administered by inhalation into the nose or lungs. These bacteria elicit T cell responses and immune responses in the tissues in which they are administered, such as the nose, esophagus, and lungs, to promote in situ immune responses, resulting in memory T cells that are antigen-specific, as well as B cells, to provide long term responses.

[1125] Additionally, methods of combination therapies with one or more additional agents for treatment, such as an anti-cancer agent or an anti-hyaluronan agent, also are provided. The bacteria can be administered by any suitable route, including, but not limited to, parenteral, systemic, topical, and local, such as intra-tumoral, intravenous, rectal, oral, intramuscular, mucosal, and other routes. Because of the modifications of the bacteria described herein, problems associated with systemic administration are solved. Formulations suitable for each route of administration are provided. The skilled person can establish suitable regimens and doses, and select routes of administration.

[1126] 1. Diagnostics for Patient Selection for Treatment and for Monitoring Treatment

[1127] a. Patient Selection

[1128] Biomarkers can be used to identify patients who are likely to respond to therapy with the immunostimulatory bacteria provided herein. For example, the Adenosine Signature and the Myeloid Signature can be assessed by NanoString gene expression panels, and T-cell infiltration of tumors can be assessed by the Immunoscore® test, which is an in vitro diagnostic test used for predicting the risk of relapse in early stage colon cancer patients, by measuring the host immune response at a tumor site. Patients whose tumors or body fluids indicate an immune responsiveness or an immune response are more likely to respond to the treatment with the immunostimulatory bacteria provided herein.

[1129] Other biomarkers include tumor-infiltrating lymphocytes (TILs), CD73, CD39, TNAP (tissue-nonspecific alkaline phosphatase), CD38, CD68, PD-L1, and FoxP3. For example, tumors that can be treated with the immunostimulatory bacteria provided herein are T-cell excluded, exhibit high levels of purines/adenosine, and are unresponsive to PD-1/PD-L1 targeted therapies.

[1130] Gene expression profiles (GEPs), which can be determined using various NanoString gene expression panels, can be analyzed, for example, to identify the “adenosine signature” of tumors. High concentrations of adenosine are found in certain tumors, including colorectal carcinoma (CRC), non-small cell lung cancer (NSCLC), and pancreatic cancer, among others. Patients with tumors that exhibit high concentrations of purines/adenosine are likely to respond to therapy, since the immunostimulatory bacteria herein accumulate and replicate in purine/adenosine rich tumor microenvironments. Thus, the identification of tumors that express an “Adenosine Signature” can be used to predict patient response to therapy. Additionally, the immunostimulatory bacteria herein preferentially accumulate in and infect tumor-resident myeloid cells. Thus, the “Myeloid Signature” also can be used to predict patient response to therapy with the immunostimulatory bacteria. For example, it has been shown that the “Adenosine Signature” is nearly identical to the “Myeloid Signature” that is associated with poor response to atezolizumab (anti-PD-L1) monotherapy in renal cell carcinoma (RCC) patients, which is indicative of the role of adenosine in tumor escape from anti-PD-L1 therapy (see, e.g., McDermott et al. (2018) Nature Medicine 24:749-757). Tumor-myeloid and tumor-adenosine NanoString signature panels are available and can be used for the selection of patients.

[1131] Macrophages limit T-cell infiltration into solid tumors and suppress their function, for example, in triple negative breast cancer (see, e.g., Keren et al. (2018) Cell 174:1373-1387). In certain cancers, such as CRC, macrophages dominate the intratumoral immune population and promote T-cell exclusion, and as a result, tumor-associated macrophages are associated with poor prognosis in CRC (see, e.g., Bindea et al. (2013) Immunity 39:782-795). Immunoscore®, a method to estimate the prognosis of cancer patients, based on the immune cells that infiltrate the cancer and surround it, can be used to measure T-cell exclusion or T-cell infiltration. Immunoscore® incorporates the effects of the host immune response into cancer classification and improves prognostic accuracy. It measures the density of two T lymphocyte populations (CD3/CD8, CD3/CD45RO, or CD8/CD45RO) in the center and at the periphery of the tumor, and provides a score ranging from 0 (I0), when low densities of both cell types are found in both regions, to Immunoscore 4 (I4), when high densities are found in both regions. Low infiltration of T lymphocytes results in a low Immunoscore®, which correlates with high risk, while high infiltration of T lymphocytes results in a high Immunoscore®, which correlates with low risk. Immunoscore®, thus, can be evaluated as a prospective biomarker to identify patients that will respond to therapy with the immunostimulatory bacteria provided herein. For example, T-cell poor/uninflamed tumors can be treated, because the immunostimulatory bacteria provided herein induce T-cell infiltration in cold tumors. Such tumors represent a high, unmet need population that is refractory to checkpoint inhibition.

[1132] Extracellular adenosine is produced by the sequential activities of membrane associated ectoenzymes, CD39 (ecto-nucleoside triphosphate diphosphohydrolase 1, or NTPDase1) and CD73 (ecto-5′-nucleotidase), which are expressed on tumor stromal cells, together producing adenosine by phosphohydrolysis of ATP or ADP that is produced from dead or dying cells. CD39 converts extracellular ATP (or ADP) to 5′-AMP, which is converted to adenosine by CD73. Expression of CD39 and CD73 on endothelial cells is increased under the hypoxic conditions of the tumor microenvironment, thereby increasing levels of adenosine. Thus, CD39 and CD73 can be used as biomarkers that indicate adenosine-rich tumors that can be targeted with the immunostimulatory bacteria provided herein.

[1133] CD38, also known as cyclic ADP ribose hydrolase, is a glycoprotein that is found on the surface of many immune cells, including CD4⁺ T-cells, CD8⁺ T-cells, B lymphocytes, and natural killer cells. The loss of CD38, which is a marker of cell activation, is associated with impaired immune responses, and has been linked to leukemias, myelomas, and solid tumors. Additionally, increased expression of CD38 is an unfavorable diagnostic marker in chronic lymphocytic leukemia and is associated with increased disease progression. CD38 also is used as a target for daratumumab (Darzalex®), which has been approved for the treatment of multiple myeloma. CD68 is highly expressed by monocytes, circulating macrophages and by tissue macrophages (e.g., Kupffer cells, microglia). FoxP3 is involved in immune system responses, and acts as a regulator in the development and function of regulatory T-cells (or Tregs), which are immunosuppressive. In cancer, an excess of regulatory T-cell activity can prevent the immune system from destroying cancer cells. Thus, CD38, CD68 and FoxP3 also can be used as biomarkers for the selection of patients that are likely, to respond to therapy with the immunostimulatory bacteria herein.

[1134] b. Diagnostics to Assess or Detect Activity of the Immunostimulatory Bacteria are Indicative of the Effectiveness of Treatment

[1135] Biomarkers can be used to monitor the immunostimulatory bacteria following treatment. Biomarkers occur in tumor samples and/or in body fluid samples, such as blood, plasma, urine, saliva, and other fluids. Validated, peripheral blood biomarkers are used to evaluate the immune status of patients prior to and during treatment, to determine changes in the immune status, which correlate with the effectiveness of treatment. A change to, or an increase in, anti-tumor immune response status indicates that treatment with the immunostimulatory bacteria is having an effect. Immunomodulatory activity of the immunostimulatory bacteria provided herein, for example, in dose escalation and expansion studies, can be assessed. Examination of biomarkers reveals prognostic and predictive factors relating to disease (e.g., a tumor) status and its treatment, which can aid in monitoring treatment. Evaluating the tumor microenvironment, for example, provides insights into the mechanism of tumor responses to immunotherapies. Serum biomarkers to detect immunomodulatory activity of the immunostimulatory bacteria include, but are not limited to, CXCL10 (IP-10), CXCL9, interferon-β, interferon-γ, proinflammatory serum cytokines (e.g., IL-6, TNF-α, MCP-1/CCL1), and IL-18 binding protein.

[1136] CXCL10 and CXCL9 are chemokines that are necessary for CD8⁺ T-cell activation and trafficking to tumors, for example, in response to immunotherapies. In a phase 3 trial of nivolumab, an anti-PD-1 immune checkpoint inhibitor, for the treatment of previously treated patients with metastatic renal cell carcinoma (mRCC), immune pharmacodynamic effects that were shared by the majority of patients, irrespective of the dose administered, were identified. Assessment of the IFN-γ regulated serum chemokines CXCL9 and CXCL10 was performed using a multiplex panel based on Luminex technology (Myriad® Rules-Based Medicine (RBM)), and the results demonstrated that increased CXCL9 and CXCL10 serum levels, as well as increased transcription in the tumor, correlated with clinical response. Median increases in chemokine levels after treatment with nivolumab from baseline were 101% for CXCL9 and 37% for CXCL10 in peripheral blood (see, e.g., Choueiri et al. (2016) Clin. Cancer Res. 22(22):5461-5471). Additionally, treatment of patients with advanced solid tumors or lymphomas with the MK-1454 STING agonist (Merck), resulted in a dose-dependent increase in serum CXCL10 after intratumoral dosing (see, e.g., Harrington et al. ESMO Annual Meeting (2018)).

[1137] Dose-dependent increases in serum levels of IFN-β were observed following intratumoral dosing of the ADU-5100 STING agonist (Aduro) (see, e.g., Meric-Bernstam et al. ASCO Annual Meeting (2019)). Additionally, intravenous administration of VNP20009 induced a dose-dependent increase in the serum levels of the pro-inflammatory cytokines IL-6, TNF-α, IL-10, and IL-12 (see, e.g., Toso et al. (2002) J Clin. Oncol. 20(1):142-152).

[1138] IL-18 participates in protective immune responses to intracellular bacteria, fungi and viruses, and has demonstrated anti-tumor activity in preclinical models of lung cancer, breast cancer, sarcoma, and melanoma. The biological activity of IL-18 is modulated in a negative feedback loop by IL-18 binding protein (IL-18BP), induced through IFN-γ. Thus, serum levels of IL-18BP are predictive of clinical IFN-γ activity. The intravenous administration of recombinant human IL-18 (rhIL-18) to patients with advanced cancers resulted in increased serum concentrations of IL-18 binding protein in a dose-dependent manner, as well as increases in IFN-γ, GM-CSF, and soluble Fas ligand (see, e.g., Robertson et al. (2006) Clin. Cancer Res. 12(14):4265-4273). Additionally, the levels of IL-18BP in urine and serum were observed to correlate with tumor status in patients with prostate cancer; significant differences in urinary IL-18BP levels were found between cases with and without prostate cancer, and increased serum IL-18BP levels correlated with increasing prostate cancer Gleason score, demonstrating that elevated IL-18BP secretion from prostate cancer cells can be indicative of an attempt by cancer to escape immune surveillance (see, e.g., Fujita et al. (2011) Int. J. Cancer 129(2):424-432). Thus, IL-18BP can be used as a biomarker for tumor immune responses.

[1139] 2. Tumors

[1140] The immunostimulatory bacteria, combinations, uses and methods provided herein are applicable to treating all types of tumors, including cancers, particularly solid tumors, including lung cancer, bladder cancer, non-small cell lung cancer, gastric cancers, head and neck cancers, ovarian cancer, liver cancer, pancreatic cancer, kidney cancer, breast cancer, colorectal cancer, and prostate cancer. The methods also can be used for treating hematological cancers.

[1141] Tumors and cancers subject to treatment by the immunostimulatory bacteria, compositions, combinations, uses and methods provided herein include, but are not limited to, those that originate in the immune system, skeletal system, muscles and heart, breast, pancreas, gastrointestinal tract, central and peripheral nervous system, renal system, reproductive system, respiratory system, skin, connective tissue systems, including joints, fatty tissues, and the circulatory system, including blood vessel walls. Examples of tumors that can be treated with the immunostimulatory bacteria provided herein include carcinomas, gliomas, sarcomas (including liposarcoma), adenocarcinomas, adenosarcomas, and adenomas. Such tumors can occur in virtually all parts of the body, including, for example, the breast, heart, lung, small intestine, colon, spleen, kidney, bladder, head and neck, ovary, prostate, brain, pancreas, skin, bone, bone marrow, blood, thymus, uterus, testicles, cervix, or liver.

[1142] Tumors of the skeletal system include, for example, sarcomas and blastomas such as osteosarcoma, chondrosarcoma, and chondroblastoma. Muscle and heart tumors include tumors of both skeletal and smooth muscles, e.g., leiomyomas (benign tumors of smooth muscle), leiomyosarcomas, rhabdomyomas (benign tumors of skeletal muscle), rhabdomyosarcomas, and cardiac sarcomas. Tumors of the gastrointestinal tract include, e.g., tumors of the mouth, esophagus, stomach, small intestine, and colon, and colorectal tumors, as well as tumors of gastrointestinal secretory organs, such as the salivary glands, liver, pancreas, and the biliary tract. Tumors of the central nervous system (CNS) include tumors of the brain, retina, and spinal cord, and can also originate in associated connective tissue, bone, blood vessels, or nervous tissue. Treatment of tumors of the peripheral nervous system are also contemplated. Tumors of the peripheral nervous system include malignant peripheral nerve sheath tumors. Tumors of the renal system include those of the kidneys, e.g., renal cell carcinoma, as well as tumors of the ureters and bladder. Tumors of the reproductive system include tumors of the cervix, uterus, ovary, prostate, testes, and related secretory glands. Tumors of the immune system include both blood-based and solid tumors, including lymphomas, e.g., both Hodgkin's and non-Hodgkin's lymphomas. Tumors of the respiratory system include tumors of the nasal passages, bronchi, and lungs. Tumors of the breast include, e.g., both lobular and ductal carcinomas.

[1143] Other examples of tumors that can be treated by the immunostimulatory bacteria and methods provided herein include Kaposi's sarcoma, CNS neoplasms, neuroblastomas, capillary hemangioblastomas, meningiomas and cerebral metastases, melanoma, gastrointestinal and renal carcinomas and sarcomas, rhabdomyosarcoma, glioblastoma (such as glioblastoma multiforme), and leiomyosarcoma. Examples of other cancers that can be treated as provided herein include, but are not limited to, lymphoma, blastoma, neuroendocrine tumors, mesothelioma, schwannoma, meningioma, melanoma, and leukemia or lymphoid malignancies. Examples of such cancers include hematologic malignancies, such as Hodgkin's lymphoma, non-Hodgkin's lymphomas (Burkitt's lymphoma, small lymphocytic lymphoma, chronic lymphocytic leukemia, mycosis fungoides, mantle cell lymphoma, follicular lymphoma, diffuse large B-cell lymphoma, marginal zone lymphoma, hairy cell leukemia, and lymphoplasmacytic leukemia), tumors of lymphocyte precursor cells, including B-cell acute lymphoblastic leukemia/lymphoma, and T-cell acute lymphoblastic leukemia/lymphoma, thymoma, tumors of the mature T and NK cells, including peripheral T-cell leukemias, adult T-cell leukemia/T-cell lymphomas and large granular lymphocytic leukemia, Langerhans cell histiocytosis, myeloid neoplasias such as acute myelogenous leukemias, including acute myeloid leukemia (AML) with maturation, AML without differentiation, acute promyelocytic leukemia, acute myelomonocytic leukemia, and acute monocytic leukemias, myelodysplastic syndromes, and chronic myeloproliferative disorders, including chronic myelogenous leukemia; tumors of the central nervous system such as glioma, glioblastoma, neuroblastoma, astrocytoma, medulloblastoma, ependymoma, and retinoblastoma; solid tumors of the head and neck (e.g., nasopharyngeal cancer, salivary gland carcinoma, and esophageal cancer), lung (e.g., small-cell lung cancer, non-small cell lung cancer, adenocarcinoma of the lung, and squamous carcinoma of the lung), digestive system (e.g., gastric or stomach cancer, including gastrointestinal cancer, cancer of the bile duct or biliary tract, colon cancer, rectal cancer, colorectal cancer, and anal carcinoma), reproductive system (e.g., testicular, penile, prostate, uterine, vaginal, vulval, cervical, ovarian, and endometrial cancers), skin (e.g., melanoma, basal cell carcinoma, squamous cell cancer, actinic keratosis, and cutaneous melanoma), liver (e.g., liver cancer, hepatic carcinoma, hepatocellular cancer, and hepatoma), bone (e.g., osteoclastoma, and osteolytic bone cancers), additional tissues and organs (e.g., pancreatic cancer, bladder cancer, kidney or renal cancer, thyroid cancer, breast cancer, cancer of the peritoneum, and Kaposi's sarcoma), tumors of the vascular system (e.g., angiosarcoma and hemangiopericytoma), Wilms' tumor, retinoblastoma, osteosarcoma, and Ewing's sarcoma.

[1144] 3. Administration

[1145] In practicing the uses and methods herein, immunostimulatory bacteria provided herein can be administered to a subject, including a subject having a tumor or having neoplastic cells, or a subject to be immunized. One or more steps can be performed prior to, simultaneously with, or after administration of the immunostimulatory bacteria to the subject, including, but not limited to, diagnosing the subject with a condition appropriate for administering immunostimulatory bacteria, determining the immunocompetence of the subject, immunizing the subject, treating the subject with a chemotherapeutic agent, treating the subject with radiation, or surgically treating the subject.

[1146] For embodiments that include administering immunostimulatory bacteria to a tumor-bearing subject for therapeutic purposes, the subject typically has previously been diagnosed with a neoplastic condition. Diagnostic methods also can include determining the type of neoplastic condition, determining the stage of the neoplastic condition, determining the size of one or more tumors in the subject, determining the presence or absence of metastatic or neoplastic cells in the lymph nodes of the subject, or determining the presence of metastases in the subject.

[1147] Some embodiments of the therapeutic methods for administering immunostimulatory bacteria to a subject can include a step of determining the size of the primary tumor or the stage of the neoplastic disease, and, if the size of the primary tumor is equal to or above a threshold volume, or if the stage of the neoplastic disease is at or above a threshold stage, an immunostimulatory bacterium is administered to the subject. In a similar embodiment, if the size of the primary tumor is below a threshold volume, or if the stage of the neoplastic disease is at or below a threshold stage, the immunostimulatory bacterium is not yet administered to the subject; such methods can include monitoring the subject until the tumor size or neoplastic disease stage reaches a threshold amount, and then administering the immunostimulatory bacterium to the subject. Threshold sizes can vary according to several factors, including rate of growth of the tumor, ability of the immunostimulatory bacterium to infect a tumor, and immunocompetence of the subject. Generally, the threshold size will be a size sufficient for an immunostimulatory bacterium to accumulate and replicate in or near the tumor, without being completely removed by the host's immune system, and will typically also be a size sufficient to sustain a bacterial infection for a time long enough for the host to mount an immune response against the tumor cells, typically about one week or more, about ten days or more, or about two weeks or more. Exemplary threshold stages are any stage beyond the lowest stage (e.g., Stage I or equivalent), or any stage where the primary tumor is larger than a threshold size, or any stage where metastatic cells are detected.

[1148] Any mode of administration of a microorganism to a subject can be used, provided the mode of administration permits the immunostimulatory bacteria to enter a tumor or metastasis. Modes of administration can include, but are not limited to, intravenous, intraperitoneal, subcutaneous, intramuscular, topical, intratumoral, multipuncture, inhalation, intranasal, oral, intracavity (e.g., administering to the bladder via a catheter, or administering to the gut by suppository or enema), aural, rectal, and ocular administration.

[1149] One skilled in the art can select any mode of administration compatible with the subject and the bacteria, and that also is likely to result in the bacteria reaching tumors and/or metastases. The route of administration can be selected by one skilled in the art according to any of a variety of factors, including the nature of the disease, the kind of tumor, and the particular bacteria contained in the pharmaceutical composition. Administration to the target site can be performed, for example, by ballistic delivery, or as a colloidal dispersion system, or systemic administration can be performed by injection into an artery.

[1150] The dosage regimen can be any of a variety of methods and amounts, and can be determined by one skilled in the art according to known clinical factors. A single dose can be therapeutically effective for treating a disease or disorder in which immune stimulation effects treatment. Exemplary of such stimulation is an immune response, that includes, but is not limited to, one or both of a specific immune response and non-specific immune response, both specific and non-specific responses, innate response, primary immune response, adaptive immunity, secondary immune response, memory immune response, immune cell activation, immune cell proliferation, immune cell differentiation, and cytokine expression.

[1151] As is known in the medical arts, dosages for a subject can depend on many factors, including the subject's species, size, body surface area, age, sex, immunocompetence, and general health, the particular bacteria to be administered, the duration and route of administration, the kind and stage of the disease, for example, the tumor size, and other compounds, such as drugs, being administered concurrently. In addition to the above factors, such levels can be affected by the infectivity of the bacteria and the nature of the bacteria, as can be determined by one skilled in the art. In the present methods, appropriate minimum dosage levels of bacteria can be levels sufficient for the bacteria to survive, grow and replicate in a tumor or metastasis. Exemplary minimum levels for administering a bacterium to a 65 kg human can include at least about 5×10⁶ colony forming units (CFUs), at least about 1×10⁷ CFUs, at least about 5×10⁷ CFUs, at least about 1×10⁸ CFUs, or at least about 1×10⁹ CFUs. In the present methods, appropriate maximum dosage levels of bacteria can be levels that are not toxic to the host, levels that do not cause splenomegaly of 3× or more, or levels that do not result in colonies or plaques in normal tissues or organs after about 1 day, or after about 3 days, or after about 7 days. Exemplary maximum levels for administering a bacterium to a 65 kg human can include no more than about 5×10¹¹ CFUs, no more than about 1×10¹¹ CFUs, no more than about 5×10¹⁰ CFUs, no more than about 1×10¹⁰ CFUs, or no more than about 1×10⁹ CFUs.

[1152] The methods and uses provided herein can include a single administration of immunostimulatory bacteria to a subject, or multiple administrations of immunostimulatory bacteria to a subject, or others of a variety of regimens, including combination therapies with other anti-tumor therapeutics and/or treatments. These include, for example, cellular therapies, such as administration of modified immune cells; CAR-T therapy; CRISPR therapy; checkpoint inhibitors, such as antibodies (e.g., anti-PD-1 antibodies, anti-PD-L1 antibodies, and anti-CTLA-4 antibodies, and other such immunotherapies); chemotherapeutic compounds, such as nucleoside analogs; surgery; and radiotherapy. Other cancer therapies also include anti-VEGF, anti-VEGFR, anti-VEGFR2, anti-TGF-0, or anti-IL-6 antibodies, or fragments thereof, cancer vaccines, and oncolytic viruses.

[1153] In some embodiments, a single administration is sufficient to establish immunostimulatory bacteria in a tumor, where the bacteria can colonize, and can cause or enhance an anti-tumor response in the subject. In other embodiments, the immunostimulatory bacteria provided for use in the methods herein can be administered on different occasions, separated in time, typically by at least one day. Separate administrations can increase the likelihood of delivering a bacterium to a tumor or metastasis, where a previous administration may have been ineffective in delivering the bacterium to a tumor or metastasis. In embodiments, separate administrations can increase the locations on a tumor or metastasis where bacterial colonization/proliferation can occur, or can otherwise increase the titer of bacteria accumulated in the tumor, which can increase eliciting or enhancing a host's anti-tumor immune response.

[1154] When separate administrations are performed, each administration can be a dosage amount that is the same or different relative to other administration dosage amounts. In one embodiment, all administration dosage amounts are the same. In other embodiments, a first dosage amount can be a larger dosage amount than one or more subsequent dosage amounts, for example, at least 10× larger, at least 100× larger, or at least 1000× larger, than subsequent dosage amounts. In one example of a method of separate administrations, in which the first dosage amount is greater than one or more subsequent dosage amounts, all subsequent dosage amounts can be the same, smaller amount, relative to the first administration.

[1155] Separate administrations can include any number of two or more administrations, including two, three, four, five, or six administrations. One skilled in the art readily can determine the number of administrations to perform, or the desirability of performing one or more additional administrations, according to methods known in the art for monitoring therapeutic methods, and other monitoring methods provided herein. Accordingly, the methods provided herein include methods of providing to the subject one or more administrations of immunostimulatory bacteria, where the number of administrations can be determined by monitoring the subject, and, based on the results of the monitoring, determining whether or not to provide one or more additional administrations. Deciding whether or not to provide one or more additional administrations can be based on a variety of monitoring results, including, but not limited to, indication of tumor growth or inhibition of tumor growth, appearance of new metastases or inhibition of metastasis, the subject's anti-bacterial antibody titer, the subject's anti-tumor antibody titer, the overall health of the subject, and the weight of the subject.

[1156] The time period between administrations can be any of a variety of time periods. The time period between administrations can be a function of any of a variety of factors, including monitoring steps, as described in relation to the number of administrations, the time period for a subject to mount an immune response, the time period for a subject to clear bacteria from normal tissue, or the time period for bacterial colonization/proliferation in the tumor or metastasis. In one example, the time period can be a function of the time period for a subject to mount an immune response; for example, the time period can be more than the time period for a subject to mount an immune response, such as more than about one week, more than about ten days, more than about two weeks, or more than about a month. In another example, the time period can be less than the time period for a subject to mount an immune response, such as less than about one week, less than about ten days, less than about two weeks, or less than about a month. In another example, the time period can be a function of the time period for bacterial colonization/proliferation in the tumor or metastasis; for example, the time period can be more than the amount of time for a detectable signal to arise in a tumor or metastasis after administration of a microorganism expressing a detectable marker, such as about 3 days, about 5 days, about a week, about ten days, about two weeks, or about a month.

[1157] The methods used herein also can be performed by administering compositions, such as suspensions and other formulations, containing the immunostimulatory bacteria provided herein. Such compositions contain the bacteria and a pharmaceutically acceptable excipient or vehicle, as provided herein or known to those of skill in the art.

[1158] As discussed above, the uses and methods provided herein also can include administering one or more therapeutic compounds, such as anti-tumor compounds or other cancer therapeutics, to a subject, in addition to administering the immunostimulatory bacteria to the subject. The therapeutic compounds can act independently, or in conjunction with the immunostimulatory bacteria, for tumor therapeutic effects. Therapeutic compounds that can act independently include any of a variety of known chemotherapeutic compounds that can inhibit tumor growth, inhibit metastasis growth and/or formation, decrease the size of a tumor or metastasis, or eliminate a tumor or metastasis, without reducing the ability of the immunostimulatory bacteria to accumulate in a tumor, replicate in the tumor, and cause or enhance an anti-tumor immune response in the subject. Examples of such chemotherapeutic agents include, but are not limited to, alkylating agents, such as thiotepa and cyclophosphamide; alkyl sulfonates, such as busulfan, improsulfan, and piposulfan; androgens, such as calusterone, dromostanolone propionate, epitiostanol, mepitiostane, and testolactone; anti-adrenals, such as aminoglutethimide, mitotane, and trilostane; anti-androgens, such as flutamide, nilutamide, bicalutamide, leuprolide, and goserelin; antibiotics, such as aclacinomycin, actinomycin, anthramycin, azaserine, bleomycin, cactinomycin, calicheamicin, carubicin, carminomycin, carzinophilin, chromomycin, dactinomycin, daunorubicin, detorubicin, 6-diazo-5-oxo-L-norleucine, doxorubicin, epirubicin, esorubicin, idarubicin, marcellomycin, mitomycins, mycophenolic acid, nogalamycin, olivomycins, peplomycin, porfiromycin, puromycin, quelamycin, rodorubicin, streptonigrin, streptozocin, tubercidin, ubenimex, zinostatin, and zorubicin; anti-estrogens, including, for example, tamoxifen, raloxifene, aromatase inhibiting 4(5)-imidazoles, 4-hydroxytamoxifen, trioxifene, keoxifene, LY 117018, onapristone, and toremifene (Fareston®); anti-metabolites, such as methotrexate and 5-fluorouracil (5-FU); folic acid analogues, such as denopterin, methotrexate, pteropterin, and trimetrexate; aziridines, such as benzodepa, carboquone, meturedepa, and uredepa; ethylenimines and methylmelamines, including altretamine, triethylenemelamine, triethylenephosphoramide, triethylenethiophosphoramide, and trimethylol melamine; folic acid replenishers, such as folinic acid; nitrogen mustards, such as chlorambucil, chlornaphazine, chlorophosphamide, estramustine, ifosfamide, mechlorethamine, mechlorethamine oxide hydrochloride, melphalan, novembichin, phenesterine, prednimustine, trofosfamide, and uracil mustard; nitrosoureas, such as carmustine, chlorozotocin, fotemustine, lomustine, nimustine, and ranimustine; platinum analogs, such as cisplatin and carboplatin; vinblastine; platinum; proteins, such as arginine deiminase and asparaginase; purine analogs, such as fludarabine, 6-mercaptopurine, thiamiprine, and thioguanine; pyrimidine analogs, such as ancitabine, azacitidine, 6-azauridine, carmofur, cytarabine, dideoxyuridine, doxifluridine, enocitabine, floxuridine, and 5-FU; taxanes, such as paclitaxel and docetaxel, and albuminated forms thereof (i.e., nab-paclitaxel and nab-docetaxel); topoisomerase inhibitors, such as RFS-2000; thymidylate synthase inhibitors, such as Tomudex®; and additional chemotherapeutics, including aceglatone; aldophosphamide glycoside; aminolevulinic acid; amsacrine; bestrabucil; bisantrene; edatrexate; defosfamide; demecolcine; diaziquone; difluoromethylornithine (DFMO); eflornithine; elliptinium acetate; etoglucid; gallium nitrate; hydroxyurea; lentinan; lonidamine; mitoguazone; mitoxantrone; mopidamol; nitracrine; pentostatin; phenamet; pirarubicin; podophyllinic acid; 2-ethylhydrazide; procarbazine; PSK®; razoxane; sizofiran; spirogermanium; tenuazonic acid; triaziquone; 2,2′,2″-trichlorotriethylamine; urethan; vindesine; dacarbazine; mannomustine; mitobronitol; mitolactol; pipobroman; gacytosine; arabinoside (“Ara-C”); cyclophosphamide; thiotepa; chlorambucil; gemcitabine; 6-thioguanine; mercaptopurine; methotrexate; etoposide (VP-16); ifosfamide; mitomycin C; mitoxantrone; vincristine; vinorelbine; Navelbine; Novantrone; teniposide; daunomycin; aminopterin; Xeloda®; ibandronate; CPT-11; retinoic acid; esperamycins; capecitabine; and topoisomerase inhibitors, such as irinotecan. Pharmaceutically acceptable salts, acids, or derivatives of any of the above also can be used.

[1159] Therapeutic compounds that act in conjunction with the immunostimulatory bacteria include, for example, compounds that increase the immune response eliciting properties of the bacteria, e.g., by increasing expression of encoded therapeutic products, such as cytokines, chemokines, co-stimulatory molecules, proteins that constitutively induce type I IFNs, RNAi molecules that inhibit, suppress, or disrupt expression of checkpoint gene(s), a checkpoint inhibitor antibody and antibodies or fragments thereof against other targets, or compounds that can further augment bacterial colonization/proliferation. For example, a gene expression-altering compound can induce or increase transcription of a gene in a bacterium, such as an exogenous gene encoded on the plasmid, thereby provoking an immune response. Any of a wide variety of compounds that can alter gene expression are known in the art, including IPTG and RU486. Exemplary genes whose expression can be up-regulated include those encoding proteins and RNA molecules, including toxins, enzymes that can convert a prodrug to an anti-tumor drug, cytokines, transcription regulating proteins, shRNA, siRNA, and ribozymes. In other embodiments, therapeutic compounds that can act in conjunction with the immunostimulatory bacteria to increase the colonization/proliferation or immune response eliciting properties of the bacteria, are compounds that can interact with a bacterially-encoded gene product, and such interaction can result in an increased killing of tumor cells or an increased anti-tumor immune response in the subject. A therapeutic compound that can interact with a bacterially-encoded gene product can include, for example, a prodrug or other compound that has little or no toxicity, or other biological activity in its subject-administered form, but after interaction with a bacterially-encoded gene product, the compound can develop a property that results in tumor cell death, including but not limited to, cytotoxicity, the ability to induce apoptosis, or the ability to trigger an immune response. A variety of prodrug-like substances are known in the art, including ganciclovir, 5-fluorouracil, 6-methylpurine deoxyriboside, cephalosporin-doxorubicin, 4-[(2-chloroethyl)(2-mesuloxyethyl)amino]benzoyl-L-glutamic acid, acetaminophen, indole-3-acetic acid, CB1954, 7-ethyl-10-[4-(1-piperidino)-1-piperidino]carbonyloxycamptothecin, bis-(2-chloroethyl)amino-4-hydroxyphenylaminomethanone 28, 1-chloromethyl-5-hydroxy-1,2-dihyro-3H-benz[e]indole, epirubicin-glucuronide, 5′-deoxy5-fluorouridine, cytosine arabinoside, and linamarin.

[1160] 4. Monitoring

[1161] The methods provided herein can further include one or more steps of monitoring the subject, monitoring the tumor, and/or monitoring the immunostimulatory bacteria administered to the subject. Any of a variety of monitoring steps can be included in the methods provided herein, including, but not limited to, monitoring tumor size, monitoring the presence and/or size of metastases, monitoring the subject's lymph nodes, monitoring the subject's weight or other health indicators, including blood or urine markers, monitoring anti-bacterial antibody titer, monitoring bacterial expression of a detectable gene product, and directly monitoring bacterial titer in a tumor, tissue, or organ of a subject.

[1162] The purpose of the monitoring can be simply for assessing the health state of the subject, or the progress of therapeutic treatment of the subject, or can be for determining whether or not further administration of the same or a different immunostimulatory bacterium is warranted, or for determining when or whether or not to administer a compound to the subject where the compound can act to increase the efficacy of the therapeutic method, or the compound can act to decrease the pathogenicity of the bacteria administered to the subject.

[1163] In some embodiments, the methods provided herein can include monitoring one or more bacterially-expressed genes. Bacteria, such as those provided herein or otherwise known in the art, can express one or more detectable gene products, including but not limited to, detectable proteins.

[1164] As provided herein, measurement of a detectable gene product expressed in a bacterium can provide an accurate determination of the level of bacteria present in the subject. As further provided herein, measurement of the location of the detectable gene product, for example, by imaging methods, including tomographic methods, can determine the localization of the bacteria in the subject. Accordingly, the methods provided herein that include monitoring a detectable bacterial gene product can be used to determine the presence or absence of the bacteria in one or more organs or tissues of a subject, and/or the presence or absence of the bacteria in a tumor or metastases of a subject. Further, the methods provided herein that include monitoring a detectable bacterial gene product can be used to determine the titer of bacteria present in one or more organs, tissues, tumors, or metastases. Methods that include monitoring the localization and/or titer of bacteria in a subject can be used for determining the pathogenicity of bacteria, since bacterial infection, and particularly the level of infection, of normal tissues and organs can indicate the pathogenicity of the bacteria. The methods that include monitoring the localization and/or titer of the immunostimulatory bacteria in a subject can be performed at multiple time points and, accordingly, can determine the rate of bacterial replication in a subject, including the rate of bacterial replication in one or more organs or tissues of a subject; accordingly, methods that include monitoring a bacterial gene product can be used for determining the replication competence of the bacteria. The methods provided herein also can be used to quantitate the amount of immunostimulatory bacteria present in a variety of organs or tissues, and tumors or metastases, and can thereby indicate the degree of preferential accumulation of the bacteria in a subject; accordingly, the bacterial gene product monitoring can be used in methods of determining the ability of the bacteria to accumulate in tumors or metastases, in preference to normal tissues or organs. Since the immunostimulatory bacteria used in the methods provided herein can accumulate in an entire tumor or can accumulate at multiple sites in a tumor, and can also accumulate in metastases, the methods provided herein for monitoring a bacterial gene product can be used to determine the size of a tumor, or the number of metastases present in a subject. Monitoring such presence of a bacterial gene product in a tumor or metastasis over a range of time can be used to assess changes in the tumor or metastasis, including growth or shrinking of a tumor, or development of new metastases, or disappearance of metastases, and also can be used to determine the rate of growth or shrinking of a tumor, or the rate of development of new metastases or disappearance of metastases, or the change in the rate of growth or shrinking of a tumor, or the change in the rate of development of new metastases or disappearance of metastases. Accordingly, monitoring a bacterial gene product can be used for monitoring a neoplastic disease in a subject, or for determining the efficacy of treatment of a neoplastic disease, by determining the rate of growth or shrinking of a tumor, or the development of new metastases or disappearance of metastases, or the change in the rate of growth or shrinking of a tumor, or the development of new metastases or disappearance of metastases.

[1165] Any of a variety of detectable proteins can be detected by monitoring, exemplary of which are any of a variety of fluorescent proteins (e.g., green fluorescent proteins), any of a variety of luciferases, transferrin, or other iron-binding proteins; or receptors, binding proteins, and antibodies, where a compound that specifically binds the receptor, binding protein or antibody can be a detectable agent, or can be labeled with a detectable substance (e.g., a radionuclide or imaging agent).

[1166] Tumor and/or metastasis size can be monitored by any of a variety of methods known in the art, including external assessment methods, or tomographic or magnetic imaging methods. In addition to the methods known in the art, methods provided herein, for example, monitoring bacterial gene expression, can be used for monitoring tumor and/or metastasis size.

[1167] Monitoring size over several time points can provide information regarding the increase or decrease in the size of a tumor or metastasis, and can also provide information regarding the presence of additional tumors and/or metastases in the subject. Monitoring tumor size over several time points can provide information regarding the development of a neoplastic disease in a subject, including the efficacy of treatment of a neoplastic disease in a subject.

[1168] The methods provided herein also can include monitoring the antibody titer in a subject, including antibodies produced in response to administration of the immunostimulatory bacteria to a subject. The bacteria administered in the methods provided herein can elicit an immune response to endogenous bacterial antigens. The bacteria administered in the methods provided herein also can elicit an immune response to exogenous genes expressed by the bacteria. The bacteria administered in the methods provided herein also can elicit an immune response to tumor antigens. Monitoring antibody titer against bacterial antigens, bacterially-expressed exogenous gene products, or tumor antigens can be used to monitor the toxicity of the bacteria, to monitor the efficacy of treatment methods, or to monitor the level of gene product(s) or antibodies for production and/or harvesting.

[1169] Monitoring antibody titer can be used to monitor the toxicity of the bacteria. Antibody titer against a bacteria can vary over the time period after administration of the bacteria to the subject, where at some particular time points, a low anti-(bacterial antigen) antibody titer can indicate a lower toxicity, while at other time points, a high anti-(bacterial antigen) antibody titer can indicate a higher toxicity. The bacteria used in the methods provided herein can be immunogenic, and can, therefore, elicit an immune response soon after administering the bacteria to the subject. Generally, immunostimulatory bacteria against which the immune system of a subject can mount a strong immune response can be bacteria that have low toxicity when the subject's immune system can remove the bacteria from all normal organs or tissues. Thus, in some embodiments, a high antibody titer against bacterial antigens soon after administering the bacteria to a subject can indicate low toxicity of the bacteria.

[1170] In other embodiments, monitoring antibody titer can be used to monitor the efficacy of treatment methods. In the methods provided herein, antibody titer, such as anti-(tumor antigen) antibody titer, can indicate the efficacy of a therapeutic method, such as a therapeutic method to treat neoplastic disease. Therapeutic methods provided herein can include causing or enhancing an immune response against a tumor and/or metastasis. Thus, by monitoring the anti-(tumor antigen) antibody titer, it is possible to monitor the efficacy of a therapeutic method in causing or enhancing an immune response against a tumor and/or metastasis.

[1171] In other embodiments, monitoring antibody titer can be used for monitoring the level of gene product(s) or antibodies for production and/or harvesting. As provided herein, methods can be used for producing proteins, RNA molecules or other compounds, by expressing an exogenous gene in a microorganism that has accumulated in a tumor, in the tumor microenvironment, and/or in tumor-resident immune cells. Monitoring antibody titer against the protein, RNA molecule, or other compound can indicate the level of production of the protein, RNA molecule, or other compound by the tumor-accumulated microorganism, and also, can directly indicate the level of antibodies specific for such a protein, RNA molecule, or other compound.

[1172] The methods provided herein also can include methods of monitoring the health of a subject. Some of the methods provided herein are therapeutic methods, including neoplastic disease therapeutic methods. Monitoring the health of a subject can be used to determine the efficacy of the therapeutic method, as is known in the art. The methods provided herein also can include a step of administering to a subject an immunostimulatory bacterium, as provided herein. Monitoring the health of a subject can be used to determine the pathogenicity of an immunostimulatory bacterium administered to a subject. Any of a variety of health diagnostic methods for monitoring disease, such as neoplastic disease, infectious disease, or immune-related disease, can be monitored, as is known in the art. For example, the weight, blood pressure, pulse, breathing, color, temperature, or other observable state of a subject can indicate the health of a subject. In addition, the presence, or absence, or level of one or more components in a sample from a subject can indicate the health of a subject. Typical samples can include blood and urine samples, where the presence, or absence, or level of one or more components can be determined by performing, for example, a blood panel or a urine panel diagnostic test. Exemplary components indicative of a subject's health include, but are not limited to, white blood cell count, hematocrit, and c-reactive protein concentration.

[1173] The methods provided herein can include monitoring a therapy, where therapeutic decisions can be based on the results of the monitoring. Therapeutic methods provided herein can include administering to a subject immunostimulatory bacteria, where the bacteria can preferentially accumulate in a tumor, the tumor microenvironment, or in tumor-resident immune cells, and/or in metastases, and where the bacteria can cause or enhance an anti-tumor immune response. Such therapeutic methods can include a variety of steps, including multiple administrations of a particular immunostimulatory bacterium, administration of a second immunostimulatory bacterium, or administration of a therapeutic compound. Determination of the amount, timing, or type of immunostimulatory bacteria or compound to administer to the subject can be based on one or more results from monitoring the subject. For example, the antibody titer in a subject can be used to determine whether or not it is desirable to administer an immunostimulatory bacterium and, optionally, a compound, the quantity of bacteria and/or compound to administer, and the type of bacteria and/or compound to administer, where, for example, a low antibody titer can indicate the desirability of administering an additional immunostimulatory bacterium, a different immunostimulatory bacterium, and/or a therapeutic compound, such as a compound that induces bacterial gene expression, or a therapeutic compound that is effective independent of the immunostimulatory bacteria.

[1174] In another example, the overall health state of a subject can be used to determine whether or not it is desirable to administer an immunostimulatory bacterium and, optionally, a compound, the quantity of bacterium and/or compound to administer, and the type of bacterium and/or compound to administer, where, for example, determining that the subject is healthy can indicate the desirability of administering additional bacteria, different bacteria, or a therapeutic compound, such as a compound that induces bacterial gene/genetic payload/therapeutic product expression. In another example, monitoring a detectable bacterially-expressed gene product can be used to determine whether it is desirable to administer an immunostimulatory bacterium and, optionally, a compound, the quantity of bacterium and/or compound to administer, and the type of bacterium and/or compound to administer, where, for example, determining that the subject is healthy can indicate the desirability of administering additional bacteria, different bacteria, or a therapeutic compound, such as a compound that induces bacterial gene/genetic payload/therapeutic product expression. Such monitoring methods can be used to determine whether or not the therapeutic method is effective, whether or not the therapeutic method is pathogenic to the subject, whether or not the bacteria have accumulated in a tumor or metastasis, and whether or not the bacteria have accumulated in normal tissues or organs. Based on such determinations, the desirability and form of further therapeutic methods can be derived.

[1175] In another example, monitoring can determine whether or not immunostimulatory bacteria have accumulated in a tumor or metastasis of a subject. Upon such a determination, a decision can be made to further administer additional bacteria, a different immunostimulatory bacterium, and, optionally, a compound to the subject.

### J. Examples

[1176] The following examples are included for illustrative purposes only and are not intended to limit the scope of the invention.

### Example 1

### Auxotrophic Strains of S. typhimurium

### The Salmonella Strain YS1646 is Auxotrophic for Adenosine

[1177] Strains provided herein are engineered to be auxotrophic for adenosine. As a result, they are attenuated in vivo because they are unable to replicate in the low adenosine concentrations of normal tissue, and colonization occurs primarily in the solid tumor microenvironment (TME), where adenosine levels are high. The Salmonella strain YS1646 is a derivative of the wild-type strain ATCC 14028, and was engineered to be auxotrophic for purines due to disruption of the purI gene (synonymous with purM) (see, e.g., Low et al. (2004) Methods Mol. Med. 90:47-60). Subsequent analysis of the entire genome of YS1646 demonstrated that the purI gene was not in fact deleted, but was instead disrupted by a chromosomal inversion (see, e.g., Broadway et al. (2014) J. Biotechnol. 192:177-178), and that the entire gene is still contained within two parts of the YS1646 chromosome that is flanked by insertion sequences, one of which has an active transposase. The presence of the complete genetic sequence of the purI gene, disrupted by means of a chromosomal reengagement, leaves open the possibility of reversion to a wild-type gene. While it has previously been demonstrated that the purine auxotrophy of YS1646 was stable after >140 serial passages in vitro, it was not clear what the reversion rate is (see, e.g., Clairmont et al. (2000) J. Infect. Dis. 181:1996-2002).

[1178] It is shown herein that, when provided with adenosine, strain YS1646 is able to replicate in minimal medium, whereas the wild-type parental strain, ATCC 14028 can grow in minimal media that is not supplemented with adenosine. Strain YS1646 was grown overnight in lysogeny broth (LB) medium, washed with M9 minimal medium, and diluted into M9 minimal medium containing no adenosine, or increasing concentrations of adenosine. Growth was measured using a SpectraMax® M3 Spectrophotometer (Molecular Devices) at 37° C., reading the OD₆₀₀ every 15 minutes.

[1179] The results showed that, unlike a wild-type strain (ATCC 14028), which was able to grow in all concentrations of adenosine, strain YS1646 only was able to replicate when adenosine was provided at concentrations ranging from 11 to 300 micromolar, and was completely unable to replicate in M9 alone, or in M9 supplemented with 130 nanomolar adenosine. These data demonstrate that purI mutants are able to replicate at concentrations of adenosine that are found in the tumor microenvironment, but not at concentrations found in normal tissues. Engineered adenosine auxotrophic strains exemplified herein include strains in which all or portions of the purI open reading frame are deleted from the chromosome to prevent reversion to wild-type. Such gene deletions can be achieved by any method known to one of skill in the art, including the lambda red system, as described below.

### The Salmonella Strain YS1646 is Auxotrophic for ATP

[1180] In addition to the purine and adenosine auxotrophy, it was determined whether the purI-deleted strain also can scavenge ATP. ATP accumulates to high levels in the tumor microenvironment, due to leakage from dying tumor cells. It is shown herein that, when provided with ATP, strain YS1646 is able to replicate in minimal media, but is unable to grow when not supplemented with ATP. To demonstrate this, strain YS1646 was grown overnight in LB medium, washed with M9 minimal medium, and diluted into M9 minimal medium containing no ATP, or increasing concentrations of ATP (Fisher). Growth was measured using a SpectraMax® M3 Spectrophotometer (Molecular Devices) at 37° C., reading the OD₆₀₀ every 15 minutes. The results demonstrated that strain YS1646 is able to replicate when ATP is provided at concentrations of 0.012 mM, but not in M9 alone.

### Example 2

### Defects in Intracellular Replication are Attributed to the msbB Mutation

[1181] The YS1646 strain contains mutations in purI, which limits replication to sites containing high concentrations of purines, adenosine, or ATP, and mutations in msbB, which alters the lipopolysaccharide (LPS) surface coat in order to reduce TLR4-mediated pro-inflammatory signaling. It also has been established that, unlike wild-type Salmonella, strain YS1646 is unable to replicate in macrophages. Experiments were performed to determine which of these genetic mutations is responsible for conferring that phenotype within the wild-type strain, ATCC 14028.

[1182] In this assay, mouse RAW macrophage cells (InvivoGen, San Diego, Ca.) were infected with wild-type Salmonella strains containing deletions in purI, msbB, or both, at a multiplicity of infection (MOI) of approximately 5 bacteria per cell for 30 minutes, then the cells were washed with PBS, and medium containing gentamicin was added to kill extracellular bacteria. Intracellular bacteria are not killed by gentamicin, as it cannot cross the cell membrane. At various time points after infection, cell monolayers were lysed by osmotic shock with water, and the cell lysates were diluted and plated on LB agar to enumerate surviving colony forming units (CFUs).

[1183] As shown in the table below, wild-type Salmonella strains containing only the purI mutation still were able to replicate. This explains why there is only a modest improvement in tolerability observed with the purI deletion alone, while achieving a high degree of specificity to the tumor microenvironment. Strains containing only the msbB⁻ mutation, as well as strains containing the purI⁻ and msbB⁻ mutations, were unable to replicate, and were rapidly cleared from cells within 48 hours.

| | CFUs/Well | | | | | |
|---|---|---|---|---|---|---|
| | ATCC 14028 | | ATCC 14028 | | ATCC 14028 | |
| Hours | ΔpurI | | ΔpurI/ΔmsbB | | ΔmsbB | |
| 1 | 104000 | 108000 | 68000 | 68000 | 88000 | 40000 |
| 2.5 | 5600 | 6000 | 760 | 960 | 3200 | 3200 |
| 5 | 5600 | 4000 | 1120 | 880 | 800 | 680 |
| 27 | 11200 | 5600 | 4 | 4 | 20 | 4 |

### Example 3

### Salmonella asd Gene Knockout Strain Engineering and Characterization

[1184] Strain YS1646Δasd was prepared. It is an attenuated Salmonella typhimurium strain derived from strain YS1646 (which can be purchased from ATCC, Catalog #202165) that has been engineered to have a deletion in the asd gene. In this example, the Salmonella typhimurium strain YS1646Δasd was engineered using modifications of the method of Datsenko and Wanner (Proc. Natl. Acad. Sci. U.S.A. 97:6640-6645 (2000)), as described below.

Introduction of the Lambda Red Helper Plasmid into Strain YS1646

[1185] The YS1646 strain was prepared to be electrocompetent as described previously (Sambrook J. (1998) Molecular Cloning, A Laboratory Manual, 2^{nd} Ed., Cold Spring Harbor, N.Y. Cold Spring Harbor Laboratory), by growing a culture in LB and concentrating 100-fold, and then washing three times with ice-cold 10% glycerol. The electrocompetent strain was electroporated with the Lambda red helper plasmid pKD46 (SEQ ID NO:218), using a 0.2 cm gap cuvette at the following settings: 2.5 kV, 186 ohms, and 50 ρF. Transformants carrying pKD46 were grown in 5 mL SOC medium with ampicillin and 1 mM L-arabinose at 30° C., and selected on LB agar plates containing ampicillin. A YS1646 clone containing the lambda red helper plasmid pKD46 then was made electrocompetent, as described above for strain YS1646.

### Construction of asd Gene Knockout Cassette

[1186] The asd gene from the genome of strain YS1646 (Broadway et al. (2014) J. Biotechnology 192:177-178) was used for designing the asd gene knockout cassette. A plasmid containing 204 and 203 base pairs (bps) of homology to the left hand and right hand regions, respectively, of the asd gene, was transformed into DH5-alpha competent cells (Thermo Fisher Scientific). A kanamycin gene cassette flanked by loxP sites was cloned into this plasmid. The asd gene knockout cassette then was PCR amplified using primers asd-1 and asd-2 (see, Table 1), and gel purified.

### Deletion of asd Gene

[1187] The YS1646 strain carrying plasmid pKD46 was electroporated with the gel-purified linear asd gene knock-out cassette. Electroporated cells were recovered in SOC medium and plated onto LB agar plates supplemented with kanamycin (20 μg/mL) and diaminopimelic acid (DAP, 50 μg/mL). During this step, lambda red recombinase induces homologous recombination of the chromosomal asd gene with the kan cassette (due to the presence of homologous flanking sequences upstream and downstream of the chromosomal asd gene), and knockout of the chromosomal copy of the asd gene occurs. The presence of the disrupted asd gene in the selected kanamycin-resistant clones was confirmed by PCR amplification, with primers from the YS1646 genome flanking the sites of disruption (primer asd-3), and from the multi-cloning site (primer scFv-3) (see, Table 1). Colonies were also replica plated onto LB plates, with and without supplemental DAP, to demonstrate DAP auxotrophy. All clones with the asd gene deletion were unable to grow in the absence of supplemental DAP, demonstrating DAP auxotrophy.

TABLE 1
Primer Information

| Primer | | SEQ |
|---|---|---|
| Name | Primer Sequence | ID NO. |
| asd-1 | ccttcctaacgcaaattccctg | 219 |
| asd-2 | ccaatgctctgcttaactcctg | 220 |
| asd-3 | gcctcgccatgtttcagtacg | 221 |
| asd-4 | ggtctggtgcattccgagtac | 222 |
| scFv-3 | cataatctgggtccttggtctgc | 223 |
| APR-001 | aaaaaagcttgcagctctggcccgtg | 226 |
| APR-002 | aaaaaagcttttagaaaaactcatcga | 227 |
| | gcatcaaatga | |
| APR-003 | acactagaaggacagtatttggtatctg | 228 |
| APR-004 | agccgtagttaggccacc | 229 |
| flic-1 | cgttatcggcaatctggaggc | 232 |
| flic-2 | ccagcccttacaacagtggtc | 233 |
| flic-3 | gtctgtcaacaactggtctaacgg | 234 |
| flic-4 | agacggtcctcatccagataagg | 235 |
| fljb-1 | ttccagacgacaagagtatcgc | 236 |
| fljb-2 | cctttaggtttatccgaagccagaatc | 237 |
| fljb-3 | caccaggtttttcacgctgc | 238 |
| fljb-4 | acacgcatttacgcctgtcg | 239 |
| pagp-1 | gcgtgacggttctgagtgct | 315 |
| pagp-2 | cgtctttgctgccatcttccg | 316 |
| pagp-3 | acaataacgacgactccgataagg | 317 |
| pagp-4 | ctgctgaatgtgctgattaacctg | 318 |
| ansb-1 | accttagaagatagccgcaaagc | 319 |
| ansb-2 | cagagacatgacacccacgattatc | 320 |
| ansb-3 | gcaaaccgctatccagaacga | 321 |
| ansb-4 | agtttaagtatgccgtggtactgc | 322 |
| csgd-1 | cacttgctttaagatttgtaatggctag | 323 |
| csgd-2 | ggtgtattcgctttcccatttgtc | 324 |
| csgd-3 | tgtgctgtccaggttaatgcc | 325 |
| csgd-4 | gacgacggttttctcgaagtctc | 326 |

### Kanamycin Gene Cassette Removal

[1188] The kan selectable marker was removed by using the Cre/loxP site-specific recombination system. The YS11646Δasd gene Kan^{R} mutant was transformed with pJW 168 (SEQ ID NO:224), a temperature-sensitive plasmid expressing the Cre recombinase. Amp^{R} colonies were selected at 30° C.; pJW168 was subsequently eliminated by growth at 42° C. A selected clone was tested for loss of kan by replica plating on LB agar plates with and without kanamycin, and confirmed by PCR verification using primers from the YS1646 genome flanking the sites of disruption (primers asd-3 and asd-4; for primer sequences, see Table 1).

Confirmation of Functional asd Deletion Mutant Strain YS1646Δasd (also designated AST-101)

[1189] The Δasd mutant was unable to grow on LB agar plates at 37° C., but was able to grow on LB plates containing 50 μg/mL diaminopimelic acid (DAP). The Δasd mutant growth rate was evaluated in LB liquid media; it was unable to grow in liquid LB, but was able to grow in LB supplemented with 50 μg/mL DAP, as determined by measuring absorbance at 600 nM.

### Sequence Confirmation of the asd Locus Sequence in Strain YS1646Δasd After asd Gene Deletion

[1190] The asd gene deletion strain was verified by DNA sequencing using primers asd-3 and asd-4 (see, Table 1). Sequencing of the region flanking the asd locus was performed, and the sequence confirmed that the asd gene was deleted from the YS1646 chromosome.

Complementation of asd Deletion by asd Expression from Plasmids

[1191] A plasmid, pATIU6 (SEQ ID NO:225), was chemically synthesized and assembled. The plasmid contained the following features: a high copy (pUC19) origin of replication, a U6 promoter for driving expression of a short hairpin, an ampicillin resistance gene flanked by HindIII restriction sites for subsequent removal, and the asd gene containing 85 base pairs of sequence upstream of the start codon (SEQ ID NO:246). Into this vector, shRNAs targeting murine TREX1 were introduced by restriction digestion with SpeI and XhoI, and ligation and cloning into E. coli DH5-alpha cells. The resulting plasmid was designated pATI-shTREX1.

Electroporation of Plasmids into Immunostimulatory Bacterial Strains

[1192] Selected plasmids, containing expression cassettes encoding immunostimulatory proteins and a functional asd gene, were electroporated into S. typhimurium strains lacking the asd gene with a BTX® ECM600 electroporator, using a 0.2 cm gap cuvette (BTX, San Diego, Calif.) at the following settings: 2.5 kV, 186 ohms, and 50 ρF. Electroporated cells were added to 1 mL SOC supplemented with 50 μM diaminopimelic acid (DAP), incubated for 1 hour at 37° C., and then spread onto agar plates that do not contain DAP, to select for strains that received plasmids with a functional asd gene. After single colony isolation, cell banks were produced by inoculating a flask of sterile lysogeny broth (LB) with a single well isolated colony of S. typhimurium, and incubating at 37° C. with agitation at 250 RPM. After the culture was grown to stationary phase, the bacteria were washed in PBS containing 10% glycerol, and stored in aliquots frozen at less than −60° C.

[1193] The plasmid pATI-shTREX1 was amplified in E. coli and purified for transformation into the YS1646Δasd strain by electroporation and clonal selection on LB Amp plates, to produce strain YS1646Δasd-shTREX1. The YS1646Δasd mutants complemented with pATIU6-derived plasmids were able to grow on LB agar and liquid media in the absence of DAP.

[1194] In a subsequent iteration, the ampicillin resistance gene (Amp^{R}) from pATI-shTREX1 was replaced with a kanamycin resistance gene. This was accomplished by digestion of the pATI-shTREX1 plasmid with HindIII, followed by gel purification to remove the Amp^{R} gene. The kanamycin resistance (Kan^{R}) gene was amplified by PCR using primers APR-001 and APR-002 (SEQ ID NO:226 and SEQ ID NO:227, respectively), followed by digestion with HindIII, and ligation into the gel purified, digested pATIU6 plasmid.

[1195] In subsequent iterations, a single point mutation was introduced into the pATIKan plasmid at the pUC19 origin of replication, using the Q5® Site-Directed Mutagenesis Kit (New England Biolabs) and the primers APR-003 (SEQ ID NO:228) and APR-004 (SEQ ID NO:229), to change the nucleotide T at position 148 to a C. This mutation makes the origin of replication homologous to the pBR322 origin of replication, which is a low copy origin of replication, in order to reduce the plasmid copy number.

### Plasmid Maintenance Demonstrated In Vivo Using asd Complementation System

[1196] In this example, CT26 tumor-bearing mice were treated with strain YS1646 containing a plasmid that expresses an shRNA targeting TREX1 (YS1646-shTREX1), or with an asd-deleted strain of YS1646, containing a plasmid with a functional asd gene and an shRNA targeting TREX1 (YS1646Δasd-shTREX1).

[1197] CT26 (Colon Tumor #26) is a tumor model that originated from exposing BALB/c mice to N-nitro-N-methylurethane (NMU), resulting in a highly metastatic carcinoma that recapitulates the aggressive, undifferentiated and checkpoint-refractory human colorectal carcinoma (see, e.g., Castle et al. (2014) BMC Genomics 15(1):190). When implanted subcutaneously in the flank, as opposed to orthotopically in the colon, the tumor immunophenotype is much more immunosuppressive and checkpoint refractory. While largely lacking in T-cell infiltration, the tumor is rich in myeloid cells, such as macrophages and myeloid-derived suppressor cells (MDSCs) (see, e.g., Zhao et al. (2017) Oncotarget 8(33):54775-54787). As this model more closely resembles human microsatellite stable (MSS) colorectal cancer, it is an ideal model to evaluate the therapeutic approach provided herein.

[1198] For this experiment, 6-8 week-old female BALB/c mice (3 mice per group) were inoculated subcutaneously (SC) in the right flank with CT26 (purchased from ATCC) tumor cells (2×10⁵ cells in 100 μL PBS). Mice bearing 8 day-old established flank tumors were intravenously (IV) injected with three doses of 5×10⁶ CFUs of the YS1646Δasd-shTREX1 strain, or the parental YS1646-shTREX1 strain, on days 8, 15, and 23. The plasmid encodes shTREX1 as an exemplary therapeutic product; any other desired therapeutic product or products can be substituted.

[1199] Body weights and tumors were measured twice weekly. Tumor measurements were performed using electronic calipers (Fowler, Newton, Mass.). Tumor volume was calculated using the modified ellipsoid formula, 1/2(length×width²). Mice were euthanized when tumor size reached >20% of body weight or became necrotic, as per IACUC regulations.

[1200] At 12 days after the final Salmonella injection, tumors were homogenized, and homogenates were serially diluted and plated on LB agar plates, to enumerate the total number of colony forming units (CFUs) present, or on LB plates containing kanamycin, to enumerate the number of kanamycin resistant colonies.

[1201] The results demonstrated that S. typhimurium strain YS1646-shTREX1 did not have selective pressure to maintain the shRNA plasmid, and demonstrated significant plasmid loss, as the percent of kanamycin resistant (Kan^{R}) colonies was less than 10%. The strain that used the asd gene complementation system for plasmid maintenance, YS1646Δasd-shTREX1, had nearly identical numbers of kanamycin resistant and kanamycin sensitive CFUs. These data demonstrate that the asd gene complementation system is sufficient to maintain the plasmid in the context of the tumor microenvironment in mice.

### Enhanced Anti-Tumor Efficacy Using Asd Complementation System

[1202] The asd complementation system is designed to prevent plasmid loss and potentiate the anti-tumor efficacy of the therapeutic product delivery by S. typhimurium strains in vivo. To test this, YS1646Δasd strains containing the shTREX1 plasmid (YS1646Δasd-shTREX1), or scrambled control (YS1646Δasd-shSCR), that contain a functional asd gene cassette, were compared for anti-tumor efficacy in a murine colon carcinoma model, to strain YS1646 containing plasmid pEQU6-shTREX1 (YS1646-shTREX1), a plasmid that lacks an asd gene cassette, and therefore, does not have a mechanism for plasmid maintenance. shTREX1 is an exemplary therapeutic product.

[1203] For this experiment, 6-8 week-old female BALB/c mice (8 mice per group) were inoculated SC in the right flank with CT26 cells (2×10⁵ cells in 100 μL PBS). Mice bearing established flank tumors were IV injected twice, on day 8 and on day 18, with 5×10⁶ CFUs of YS1646Δasd-shTREX1, or YS1646-shTREX1, and compared to PBS control.

[1204] The YS1646-shTREX1 strain demonstrated enhanced tumor control compared to PBS (70% tumor growth inhibition (TGI), day 28) despite its demonstrated plasmid loss over time. The Δasd strain containing the plasmid with the asd gene complementation system and shTREX1 (YS1646Δasd-shTREX1) demonstrated superior tumor growth inhibition compared to PBS (82% TGI, p=0.002, day 25). These data demonstrate that improved potency is achieved by preventing plasmid loss, using the asd complementation system, and delivery of shTREX1, as compared to YS1646 containing plasmids without the asd gene complementation system. Thus, strains with asd complementation systems are superior anti-cancer therapeutics.

### Example 4

[1205] S. typhimurium Flagellin Knockout by Deletion of the fliC and fljB Genes Strain Engineering and Characterization

[1206] In the example herein, the live attenuated S. typhimurium YS1646 strain containing the asd gene deletion was further engineered to delete the fliC and fljB genes, in order to remove both flagellin subunits. This eliminates pro-inflammatory TLR5 activation, in order to reduce pro-inflammatory signaling and improve anti-tumor adaptive immunity.

Deletion of fliC Gene

[1207] In this example, fliC was deleted from the chromosome of the YS1646Δasd strain using modifications of the method of Datsenko and Wanner (Proc. Natl. Acad. Sci. U.S.A. 97:6640-6645 (2000)) as described in detail in the previous example. Briefly, synthetic fliC gene homology arm sequences, that contained 224 and 245 bases of homologous sequence flanking the fliC gene, were cloned into a plasmid called pSL0147 (SEQ ID NO:230). A kanamycin gene cassette flanked by cre/loxP sites then was cloned into plasmid pSL0147, and the fliC gene knockout cassette was then PCR amplified with primers flic-1 (SEQ ID NO:232) and flic-2 (SEQ ID NO:233), gel purified, and then introduced into the YS1646Δasd strain carrying the temperature sensitive lambda red recombination plasmid pKD46, by electroporation. Electroporated cells were recovered in SOC+DAP medium, and plated onto LB agar plates supplemented with kanamycin (20 μg/mL) and diaminopimelic acid (DAP, 50 μg/mL). Colonies were selected and screened for insertion of the knockout fragment by PCR using primers flic-3 (SEQ ID NO:234) and flic-4 (SEQ ID NO:235). pKD46 then was cured by culturing the selected kanamycin resistant strain at 42° C. and screening for loss of ampicillin resistance. The kanamycin resistance marker then was cured by electroporation of a temperature-sensitive plasmid expressing the Cre recombinase (pJW168), and Amp^{R} colonies were selected at 30° C.; pJW168 was subsequently eliminated by growing cultures at 42° C. Selected fliC knockout clones were then tested for loss of the kanamycin marker by PCR, using primers flanking the sites of disruption (flic-3 and flic-4), and evaluation of the electrophoretic mobility on agarose gels.

Deletion of fljB Gene

[1208] The fljB gene was then deleted from the YS1646Δasd/ΔfliC strain using modifications of the methods described above. Synthetic fljB gene homology arm sequences that contained 249 and 213 bases of the left hand and right hand sequence, respectively, flanking the fljB gene, were synthesized and cloned into a plasmid called pSL0148 (SEQ ID NO:231). A kanamycin gene cassette flanked by cre/loxP sites then was cloned into pSL0148, and the fljB gene knockout cassette was PCR amplified with primers fljb-1 (SEQ ID NO:236) and fljb-2 (SEQ ID NO:237) (see, Table 1), gel purified, and introduced into strain YS1646Δasd/ΔfliC carrying the temperature sensitive lambda red recombination plasmid pKD46, by electroporation. The kanamycin resistance gene then was cured by Cre-mediated recombination, as described above, and the temperature-sensitive plasmids were cured by growth at non-permissive temperature. The fliC and fljB gene knockout sequences were amplified by PCR using primers flic-3 and flic-4, or fljb-3 (SEQ ID NO:238) and fljb-4 (SEQ ID NO:239), respectively, and verified by DNA sequencing. This mutant derivative of strain YS1646 was designated YS1646Δasd/ΔfliC/ΔfljB, or YS1646Δasd/ΔFLG for short.

In Vitro Characterization of Engineered S. typhimurium Flagellin Knockout Strain

[1209] The YS1646-derived asd⁻ mutant strain harboring the deletions of both fliC and fljB, herein referred to as YS1646Δasd/ΔFLG, was evaluated for swimming motility by spotting 10 microliters of overnight cultures onto swimming plates (LB containing 0.3% agar and 50 mg/mL DAP). While motility was observed for the YS1646Δasd strain, no motility was evident with the YS1646Δasd/ΔFLG strain. The YS1646Δasd/ΔFLG strain then was electroporated with a plasmid containing an asd gene, and its growth rate in the absence of DAP was assessed. The YS1646Δasd/ΔFLG strain, with an asd complemented plasmid was able to replicate in LB in the absence of supplemental DAP, and grew at a rate comparable to the YS1646Δasd strain containing an asd complemented plasmid. These data demonstrate that the elimination of flagellin does not decrease the fitness of S. typhimurium in vitro.

### Elimination of Flagella Decreases Pyroptosis in Murine Macrophages

[1210] 5×10⁵ mouse RAW macrophage cells (InvivoGen, San Diego, Ca.) were infected with the YS1646Δasd/ΔFLG strain, or the parental YS1646Δasd strain, both harboring an asd complemented plasmid, at an MOI of approximately 100 in a gentamicin protection assay. After 24 hours of infection, culture supernatants were collected and assessed for lactate dehydrogenase release as a marker of macrophage cell death, using a Pierce™ LDH Cytotoxicity Assay Kit (Thermo Fisher Scientific, Waltham, Ma.). The YS1646Δasd strain induced 75% maximal LDH release, while the YS1646Δasd/ΔFLG strain induced 54% maximal LDH release, demonstrating that deletion of the flagellin genes reduces the S. typhimurium-induced pyroptosis of infected macrophages.

### Flagella-Deleted Mutants Lead to Less Pyroptosis in Infected Human Monocytes

[1211] To demonstrate that the YS1646Δasd/ΔFLG strains are reduced in their ability to cause cell death in macrophages, THP-1 human macrophage cells (ATCC Catalog #202165) were infected with the S. typhimurium strains YS1646 and YS1646Δasd/ΔFLG, with the Δasd strain containing plasmids encoding a functional asd gene to ensure plasmid maintenance. 5×10⁴ cells were placed in a 96-well dish with DMEM and 10% FBS. Cells were infected with washed log-phase cultures of S. typhimurium for 1 hour at an MOI of 100 CFUs per cell, then the cells were washed with PBS, and the media was replaced with media containing 50 μg/mL gentamicin to kill extracellular bacteria, and 50 ng/mL of IFNγ to convert the monocytes into a macrophage phenotype. After 24 hours, the THP-1 cells were stained with CellTiter-Glo© reagent (Promega), and the percentage of viable cells was determined using a luminescent cell viability assay using a SpectraMax® MR plate reader (Molecular Devices) to quantify the luminescence. The cells infected with the YS1646 strain had only 38% viability, while the cells infected with the YS1646Δasd/ΔFLG strain had 51% viability, indicating that the deletion of the flagellin genes induced less cell death of human macrophages, despite a very high and supraphysiological MOI.

Flagella is not Required for Tumor Colonization after Systemic Administration

[1212] To assess the impact of the flagellin knockout strains, administered in a murine model of colon carcinoma, 6-8 week-old female BALB/c mice (5 mice per group) were inoculated SC in the right flank with CT26 cells (2×10⁵ cells in 100 μL PBS). Mice bearing 10-day established flank tumors were IV injected with a single dose of 3×10⁵ CFUs of the YS1646Δasd/ΔFLG-shTREX1 strain, or the parental YS1646Δasd-shTREX1 strain. At day 35 post tumor implantation, mice were euthanized, and tumors were homogenized and plated on LB plates to enumerate the number of colony forming units (CFUs) per gram of tumor tissue. The YS1646Δasd-shTREX1 strain colonized tumors at a mean of 5.9×10⁷ CFUs per gram of tumor tissue, while the flagella-deleted YS1646Δasd/ΔFLG-shTREX1 strain colonized the tumors with almost a 2-fold increased mean of 1.1×10⁸ CFUs/g of tumor tissue. The splenic colonization of the YS1646Δasd-shTREX1 strain was calculated as a mean of 1.5×10³ CFUs/g of spleen tissue, whereas splenic colonization of the flagella-deleted YS1646Δasd/ΔFLG-shTREX1 strain was slightly lower, at a mean of 1.2×10³ CFUs/g of spleen tissue.

[1213] These data demonstrate that the absence of flagella not only does not negatively impact tumor colonization after IV administration, but it enhances tumor colonization compared to the flagella-intact strain. Importantly, deletion of the flagella slightly reduces splenic colonization, giving a tumor to spleen ratio of 100,000-fold. These data demonstrate that, contrary to the expectation from the art, not only are the flagella not required for tumor colonization, but their elimination enhances tumor colonization, while reducing splenic colonization.

### The Flagella-Deleted Strain Demonstrates Enhanced Anti-Tumor Activity in Mice

[1214] To assess the impact of the flagellin knockout strains, administered in a murine model of colon carcinoma, 6-8 week-old female BALB/c mice (5 mice per group) were inoculated SC in the right flank with CT26 cells (2×10⁵ cells in 100 μL PBS). Mice bearing established flank tumors were IV injected with a single dose of 3×10⁵ CFUs of the YS1646Δasd/ΔFLG-shTREX1 strain, or the YS1646Δasd-shTREX1 strain, and compared to PBS control. Mice were monitored by caliper measurements for tumor growth.

[1215] The results demonstrated that the YS1646Δasd/ΔFLG-shTREX1 strain, incapable of making flagella, showed enhanced tumor control compared to the parental YS1646Δasd-shTREX1 strain (27% TGI, day 24), and significant tumor control compared to the PBS control (73% TGI, p=0.04, day 24). These data demonstrate that, not only is the flagella not required for tumor colonization, but its loss can enhance anti-tumor efficacy.

### Flagella-Deleted Strains Demonstrate Enhanced Adaptive Immunity in a Murine Tumor Model

[1216] The impact of deletion of the flagellin on the immune response, and whether STING activation from tumor myeloid cell-delivery of shRNA to the STING checkpoint gene TREX1 would promote an adaptive type I IFN immune signature, was assessed. The CT26 murine model of colon carcinoma was used, where 6-8 week-old female BALB/c mice (5 mice per group) were inoculated SC in the right flank with CT26 cells (2×10⁵ cells in 100 μL PBS). Mice bearing established flank tumors were IV injected 11 days post tumor implantation with 5×10⁶ CFUs of the YS1646Δasd/ΔFLG-shTREX1 strain, or the parental YS1646Δasd-shTREX1, or the scrambled plasmid control strain, YS1646Δasd-shSCR, and compared to PBS control.

[1217] Mice were bled 7 days post-dosing on Sodium Heparin coated tubes (Becton Dickinson). Non-coagulated blood was then diluted in the same volume of PBS and peripheral blood mononuclear cells (PBMCs) were separated from the interphase layer of whole blood using Lympholyte®-M cell separation reagent (Cedarlane). Isolated PBMCs were washed with PBS+2% FBS by centrifugation at 1300 RPM for 3 minutes at room temperature, and resuspended in flow buffer. One million PBMCs were seeded per well of a V-bottom 96-well plate. Cells were centrifuged at 1300 RPM for 3 minutes at room temperature (RT) and resuspended in 100 μL of flow buffer containing fluorochrome-conjugated AH1 peptide:MHC class I tetramers (MBL International), and the cell surface flow cytometry antibodies CD4 FITC clone RM4-5; CD8a BV421 clone 53-6.7; F4/80 APC clone BM8; CD11b PE-Cy7 clone M1/70; CD45 BV570 clone 30-F11; CD3 PE clone 145-2C11; Ly6C BV785 clone HK1.4; I-A/I-E APC-Cy7 clone M5/114.15.2; Ly6G BV605 clone 1A8; and CD24 PercP-Cy5.5 clone M1/69 (all from BioLegend), for 45 minutes at room temperature and in the dark. After 45 minutes, the cells were washed twice with PBS+2% FBS by centrifugation at 1200 RPM for 3 minutes. The cells were then resuspended in PBS+2% FBS containing DAPI (4′,6-diamino-2-phenylindole; dead/live stain), and data were immediately acquired using the NovoCyte® flow cytometer (ACEA Biosciences, Inc.) and analyzed using FlowJo™ software (Tree Star, Inc.).

[1218] The following cell types were enumerated as a percentage of total live cells: CD11b⁺ Gr1⁺ neutrophils (possibly MDSCs, although further phenotyping in an ex vivo functional assay would be required), CD11b⁺ F4/80⁺ macrophages, CD8⁺ T-cells, and CD8⁺ T-cells that recognize the CT26 tumor rejection antigen gp70 (AH1), the product of the envelope gene of murine leukemia virus (MuLV)-related cell surface antigen (see, e.g., Castle et al. (2014) BMC Genomics 15(1):190).

[1219] The results, summarized in the table below, show that the YS1646Δasd-shSCR strain, containing a plasmid encoding a non-specific scrambled shRNA, elicits the typical anti-bacterial immune profile of significantly increased neutrophils, as compared to PBS (p=0.02), to the flagella-intact YS1646Δasd-shTREX1 strain (p=0.02), and to the flagella-deleted strain YS1646Δasd/ΔFLG-shTREX1 (p=0.01), which had the lowest levels of circulating neutrophils. Similarly, bacterially-induced macrophages also were significantly elevated in the YS1646Δasd-shSCR strain, as compared to PBS (p=0.01), to the YS1646Δasd-shTREX1 strain (p=0.01), and to YS1646Δasd/ΔFLG-shTREX1 strain (p=0.01). Thus, both strains carrying type I IFN-inducing payloads were capable of overwriting the normal anti-bacterial immune response, which clears bacterial infections through neutrophils and macrophages, and does not induce adaptive T-cell-mediate immunity. However, while the overall circulating levels of CD8⁺ T-cells were similar across all groups, the flagella-deleted YS1646Δasd/ΔFLG-shTREX1 strain demonstrated significantly increased percentages of AH1-tetramer⁺ CD8⁺ T-cells, as compared to PBS (p=0.04).

[1220] These data demonstrate the feasibility of engineering a bacteria to deliver viral-like type I IFN-inducing plasmids to tumor-resident myeloid cells. This results in a dramatic reprogramming of the immune response towards a more viral, and less bacterial, immune profile. Deletion of the flagella further enhanced the shift away from bacterially-recruited neutrophils and macrophages, and towards significantly increased tumor antigen-specific CD8⁺ T-cells. Thus, eliminating bacterial TLR5-mediated inflammation can enhance adaptive immunity.

| | % Live Cells Mean ± SD | | | |
|---|---|---|---|---|
| | | YS1646Δasd- | YS1646Δasd- | YS1646Δasd/ |
| Immune Cells | PBS | shSCR | shTREX1 | ΔFLG-shTREX1 |
| Neutrophils | 6.27 ± 2.62 | 19.21 ± 9.46 | 5.87 ± 3.94 | 4.01 ± 1.65 |
| Macrophages | 10.08 ± 2.11 | 23.14 ± 9.04 | 9.12 ± 3.84 | 7.39 ± 2.11 |
| CD8⁺ T-Cells | 6.64 ± 0.56 | 7.17 ± 0.60 | 7.14 ± 2.30 | 6.44 ± 1.43 |
| AH1⁺ CD8⁺ T-Cells | 0.83 ± 0.12 | 1.06 ± 1.11 | 2.27 ± 1.44 | 4.12 ± 3.08 |

SD = Standard deviation

### Flagella-Deleted Strains are Restricted to the Phagocytic Myeloid Immune Cell Compartment In Vivo

[1221] According to the literature, ΔfljB/ΔfliC strains demonstrate suppression of many downstream genes associated with SPI-1-mediated entry into non-phagocytic cells. In order to determine whether the YS1646Δasd/ΔFLG strain also is deficient for non-phagocytic cell uptake, a YS1646Δasd/ΔFLG strain, constitutively expressing mCherry (a red fluorescent protein) under the bacterial rpsM promoter, was IV administered to MC38 subcutaneous flank tumor-bearing mice.

[1222] The MC38 (murine colon adenocarcinoma #38) model was derived similarly as the CT26 model using mutagenesis, but with dimethylhydralazine, and in a C57BL/6 mouse strain (see, e.g., Corbett et al. (1975) Cancer Res. 35(9):2434-2439). Similarly to CT26, subcutaneous implantation results in a more T-cell excluded and immunosuppressive tumor microenvironment than when implanted orthotopically in the colon (see, e.g., Zhao et al. (2017) Oncotarget 8(33):54775-54787). MC38 has a higher mutational burden than CT26, and a similar viral-derived gp70 antigen (p15E) that can be detected by CD8⁺ T-cells, although it is not considered a rejection antigen. While variants of MC38 have been found to be partially responsive to checkpoint therapy, most variants of the cell line are considered checkpoint refractory and T-cell excluded (see, e.g., Mariathasan et al. (2018) Nature 555:544-548), including the MC38 cells used herein.

[1223] For this experiment, 6-8 week-old female C57BL/6 mice (5 mice per group) were inoculated SC in the right flank with MC38 cells (5×10⁵ cells in 100 μL PBS). Mice bearing large established flank tumors were IV injected on day 34 with 1×10⁶ CFUs of the YS1646Δasd/ΔFLG-mCherry strain. Tumors were resected 7 days post-IV dosing, and cut into 2-3 mm pieces into gentleMACS™ C tubes (Miltenyi Biotec) filled with 2.5 mL enzyme mix (RPMI-1640 containing 10% FBS with 1 mg/mL Collagenase IV and 20 μg/mL DNase I). The tumor pieces were dissociated using OctoMACS™ (Miltenyi Biotec) specific dissociation program (mouse implanted tumors), and the whole cell preparation was incubated with agitation for 45 minutes at 37° C. After the 45 minute incubation, a second round of dissociation was performed using the OctoMACS™ (mouse implanted tumor) program, and the resulting single cell suspensions were filtered through a 70 μM nylon mesh into a 50 mL tube. The nylon mesh was washed once with 5 mL of RPMI-1640+10% FBS, and the cells were filtered a second time using a new 70 μM nylon mesh into a new 50 mL tube. The nylon mesh was washed with 5 mL of RPMI-1640+10% FBS, and the filtered cells were then centrifuged at 1000 RPM for 7 minutes. The resulting dissociated cells were resuspended in PBS and kept on ice before the staining process.

[1224] For the flow-cytometry staining, 100 μL of the single cell suspensions were seeded in wells of a V-bottom 96-well plate. PBS containing a dead/live stain (Zombie Aqua™, BioLegend), and Fc Blocking reagents (BD Biosciences), were added at 100 μL per well and the cells were incubated on ice for 30 minutes in the dark. After 30 minutes, the cells were washed twice with PBS+2% FBS by centrifugation at 1300 RPM for 3 minutes. Cells were then resuspended in PBS+2% FBS containing fluorochrome-conjugated antibodies (CD4 FITC clone RM4-5; CD8a BV421 clone 53-6.7; F4/80 APC clone BM8; CD11b PE-Cy7 clone M1/70; CD45 BV570 clone 30-F11; CD3 PE clone 145-2C11; Ly6C BV785 clone HK1.4; I-A/I-E APC-Cy7 clone M5/114.15.2; Ly6G BV605 clone 1A8; and CD24 PercP-Cy5.5 clone M1/69, all from BioLegend), and incubated on ice for 30 minutes in the dark. After 30 minutes, the cells were washed twice with PBS+2% FBS by centrifugation at 1300 RPM for 3 minutes and resuspended in flow cytometry fixation buffer (Thermo Fisher Scientific). Flow cytometry data were acquired using the NovoCyte® Flow Cytometer (ACEA Biosciences, Inc.), and analyzed using the FlowJo™ software (Tree Star, Inc.).

[1225] The results demonstrated that 7.27% of tumor-infiltrating monocytes had taken up the flagella-deleted mCherry strain in the tumor microenvironment. Similarly, 8.96% of the tumor-associated macrophage (TAM) population, and 3.33% of the tumor-infiltrating dendritic cells (DCs) had taken up the flagella-deleted mCherry strain. In contrast, within the CD45⁻ population, corresponding to stromal and tumor cells, only 0.076% showed positivity for mCherry expression (compared to 0.067% background staining). These data demonstrate that the flagella and its downstream signaling impact on SPI-1, are necessary to enable epithelial cell infectivity, and that the lack thereof restricts uptake of the bacteria to only the phagocytic immune cell compartment of the tumor microenvironment (i.e., tumor-resident immune/myeloid cells).

[1226] Deletion of the flagella confers multiple benefits to the immunostimulatory S. typhimurium strain, including eliminating TLR5-induced inflammatory cytokines that suppress adaptive immunity, reducing macrophage pyroptosis, as well as maintaining (or enhancing) tumor-specific enrichment upon systemic administration, where uptake is confined to tumor-resident phagocytic cells.

### Example 5

### Salmonella pagP Gene Knockout Strain Engineering and Characterization

[1227] In this example, the YS1646Δasd/ΔFLG strain was further modified to delete pagP. The pagP gene is induced during the infectious life cycle of S. typhimurium, and encodes an enzyme (lipid A palmitoyltransferase) that modifies lipid A with palmitate. In wild-type S. typhimurium, expression of pagP results in a lipid A molecule that is hepta-acylated. In an msbB⁻ mutant, in which the terminal acyl chain of lipid A cannot be added, the expression of pagP results in a hexa-acylated lipid A molecule. LPS with hexa-acylated lipid A has been shown to be highly pro-inflammatory, and to have a high affinity for TLR4 (hepta-acylated lipid A, found in wild-type, has the highest affinity for TLR4). In this example, a strain deleted of pagP and msbB can produce only penta-acylated lipid A, allowing for lower pro-inflammatory cytokines due to low affinity for TLR4, enhanced tolerability, and increased adaptive immunity when the bacteria are engineered to deliver plasmids encoding immunomodulatory proteins.

ΔpagP Strain Construction

[1228] The pagP gene was deleted from the YS1646Δasd/ΔFLG strain using modifications of the methods described in the preceding examples. Synthetic pagP gene homology arm sequences that contain 203 and 279 bases of the left hand and right hand sequence, respectively, flanking the pagP gene, were synthesized and cloned into a plasmid called pSL0191 (SEQ ID NO:331). A kanamycin gene cassette flanked by cre/loxP sites then was cloned into pSL0191, and the pagP gene knockout cassette was PCR amplified with primers pagp-1 (SEQ ID NO:315) and pagp-2 (SEQ ID NO:316) (see, Table 1), gel purified, and introduced into strain YS1646Δasd/ΔFLG, carrying the temperature sensitive lambda red recombination plasmid pKD46, by electroporation. The kanamycin resistance gene then was cured by Cre-mediated recombination, as described above, and the temperature-sensitive plasmids were cured by growth at non-permissive temperature. The pagP gene knockout sequences were amplified by PCR using primers pagp-3 (SEQ ID NO:317) and pagp-4 (SEQ ID NO:318), and verified by DNA sequencing. The resulting mutant derivative of YS1646 was designated YS1646Δasd/ΔFLG/ΔpagP.

pagP Deletion Mutants have LPS with Penta-Acylated Lipid A, and Induce Reduced Inflammatory Cytokines

[1229] The pagP gene also was deleted from the YS1646Δasd strain using the lambda-derived Red recombination system, as described in Datsenko and Wanner (Proc. Natl. Acad. Sci. U.S.A. 97:6640-6645 (2000)) and above, to generate the strain YS1646Δasd/ΔpagP. This strain was then electroporated with a plasmid containing a functional asd gene, to complement the deleted asd gene and to ensure plasmid maintenance in vivo. The lipid A was then extracted from this strain and evaluated by Matrix-Assisted Laser Desorption/Ionization Mass Spectrometry (MALDI MS) and compared to lipid A from the wild-type S. typhimurium strain ATCC 14028, the YS1646 strain (which is deleted for msbB and purI), and the YS1646Δasd strain. Wild-type Salmonella had a minor lipid A peak with a mass of 2034, and a major peak with a mass of 1796, corresponding to the hepta-acylated and hexa-acylated species, respectively, due to the presence of a functional msbB gene. The msbB-deleted strains, YS1646 and YS1646Δasd, had major peaks at 1828 and 1585, corresponding to a mixture of hexa-acylated and penta-acylated lipid A. The msbB and pagP deleted strain, YS1646Δasd/ΔpagP, had only a single peak with a mass of 1585, corresponding to penta-acylated lipid A. These data demonstrate that deletion of pagP prevents palmitoylation of the lipid A, thereby restricting it to a single penta-acylated species.

[1230] To determine whether the LPS with penta-acylated lipid A from the ΔpagP mutant strains reduced TLR4 signaling, 4 μg of purified LPS from the wild-type strain, the YS1646 strain, or the YS1646Δasd/ΔpagP strain, was added to THP-1 human monocytic cells (ATCC Catalog #TIB-202), and the supernatants were evaluated 24 hours later for the presence of inflammatory cytokines using a Cytometric Bead Array (CBA) kit (BD Biosciences). The results showed that LPS from the YS1646Δasd/ΔpagP strain induced 25% of the amount of TNFα, compared to wild-type LPS, and induced 7-fold less IL-6 than wild-type LPS. The LPS from the YS1646Δasd/ΔpagP strain induced 22-fold less IL-6 than strain YS1646, demonstrating that the penta-acylated LPS species from a ΔpagP mutant is significantly less inflammatory in human cells, and indicating that the ΔpagP mutant would be better tolerated in humans.

Deletion of pagP Induces Significantly Less IL-6 in Primary Human M2 Macrophages

[1231] To demonstrate that the YS1646Δasd/ΔFLG/ΔpagP strain also elicits less inflammatory and dose-limiting IL-6 from primary human M2 macrophages, the strain was evaluated, and compared with the YS1646Δasd/ΔFLG and the parental YS1646 strains. The M2 macrophages derived from human donors are representative of the immunosuppressive phenotypes that are highly enriched in T-cell excluded solid tumors. Frozen human PBMCs, isolated from healthy human donors, were thawed in complete medium (RPMI-1640+1× non-essential amino acids+5% human AB serum), and washed by centrifugation for 10 minutes at 800 RPM at room temperature. PBMCs were resuspended in PBS+2% FBS, and monocytes were negatively isolated using a CD16 depletion kit (StemCell Technologies). Isolated untouched monocytes were then washed by centrifugation in PBS+2% FBS and resuspended in complete medium containing 100 ng/mL human macrophage colony-stimulating factor (M-CSF) and 10 ng/mL human IL-4. Isolated monocytes (3e5 per well) were then seeded in a 24-well plate with a final volume of 750 μL. Two days after seeding, the cell culture media was entirely aspirated and replaced with fresh complete medium containing 100 ng/mL human M-CSF and 10 ng/mL human IL-4. Two days later (on day 4), 500 μL of complete medium, containing cytokines100 ng/mL human M-CSF and 10 ng/mL human IL-4, was added per well for 48 hours. On day 6, the cell culture media was entirely aspirated and replaced with fresh complete medium without cytokines, alone, or with media containing the log-phase cultures of the S. typhimurium strains at an MOI of 20. Cells were infected for 1 hour, then washed with PBS, and the media was replaced with fresh media containing 50 μg/mL gentamicin to kill extracellular bacteria. The wells were then washed and replaced with fresh media and allowed to incubate at 37° C. and 5% CO₂. After 48 hours, supernatants were harvested and assayed for cytokines using a human IL-6 cytometric bead array (CBA) kit (BD Biosciences), according to the manufacturer's instructions.

[1232] The results demonstrated that secreted IL-6 levels from human primary M2 macrophages, infected with parental strain YS1646, yielded an average of 14839±926 μg/mL, while the IL-6 levels from the YS1646Δasd/ΔFLG strain were significantly lower, at 2075±723 μg/mL (p=0.004). This further affirms the impact that the deletion of flagella, and elimination of TLR5 signaling, has on the induction of IL-6. The YS1646Δasd/ΔFLG/ΔpagP strain elicited the lowest IL-6 levels, at 332±100 μg/mL, demonstrating the reduced ability of this modified LPS coating to stimulate TLR4, and the resulting dramatically reduced inflammatory IL-6 production.

The Combined Flagella and pagP Deletions Significantly Enhance Tolerability in Mice

[1233] To determine whether the modified strains described above are more attenuated than parental strain YS1646, a median lethal dose (LD₅₀) study was conducted. 6-8 week-old BALB/c mice (5 mice per group) were injected intravenously with a dose range of 3e5 to 3e7 CFUs of strain YS1646, or the derivative strains YS1646Δasd/ΔFLG, YS1646Δasd/ΔpagP, and YS1646Δasd/ΔFLG/ΔpagP. Unlike strain YS1646, the derivative strains also carried a plasmid encoding murine IL-2, an FDA-approved cytokine that has demonstrated significant toxicity when systemically administered.

[1234] The LD₅₀ for strain YS1646 was found to be 4.4×10⁶ CFUs (average of two studies), in line with previously published LD₅₀ reports of YS1646, and a >1000-fold improvement compared to wild-type S. typhimurium (see, e.g., Clairmont et al. (2000) J. Infect. Dis. 181:1996-2002). The LD₅₀ for the YS1646Δasd/ΔFLG strain was determined to be 2.07×10⁷ CFUs, demonstrating a greater than 4.5-fold reduction in virulence compared to strain YS1646. The LD₅₀ for the YS1646Δasd/ΔpagP strain was determined to be 1.39×10⁶ CFUs, demonstrating at least a 3.2-fold reduction in virulence compared to strain YS1646, which is expected, given that the strain still has highly inflammatory flagella. The LD₅₀ for the YS1646Δasd/ΔFLG/ΔpagP strain could not be established, as no mice died at the highest dose given, but was >6.2×10⁷ CFUs. The YS1646Δasd/ΔFLG/ΔpagP strain therefore demonstrates a >14-fold reduction in virulence compared to parental YS1646 strain. These data demonstrate that the genetic modifications described above reduce the virulence of the clinical S. typhimurium strain, YS1646 (also known as VNP20009), and therefore, lead to increased tolerability in humans.

[1235] In the Phase I clinical trial of VNP20009 (see, e.g., Toso et al. (2002) J Clin. Oncol. 20(1):142-152), the presence of the bacteria in patients' tumors only partially was observed at the two highest doses tested, 3×10⁸ CFU/m² (33% presence), and 1×10⁹ CFU/m² (50% presence), indicating that the tolerable dose of VNP20009 was too low to achieve tumor colonization. By improving the tolerability of the strains through the modifications described above, >14-fold higher doses can be administered, if necessary, improving the percentage of patients whose tumors will be colonized, and increasing the level of therapeutic colonization per tumor, thereby solving the observed problems with VNP20009.

The Combined Flagella and pagP Deletions Significantly Limit the Generation of Anti-S. typhimurium Antibodies in Mice

[1236] The surviving mice from the 3×10⁶ CFU dosing group described above (N=5, except for N=4 in the YS1646 dosing group) were kept for 40 days post IV dosing, at which time they were bled for serum, and assessed for antibody titers to S. typhimurium, by a modified flow-based antibody titering system. Overnight cultures of the YS1646Δasd/ΔFLG-mCherry strain were washed and fixed with flow cytometry fixation buffer. Sera from the previously-treated mice, and from naïve control mice, were seeded in a 96-well plate, and serial dilutions were performed in PBS. Next, 25 μL of the YS1646Δasd/ΔFLG-mCherry cultures, containing 1×10⁶ CFUs, were added to the sera and incubated for 25 minutes at room temperature (RT). The bacteria were then washed twice with PBS by spinning them at 4000 RPM for 5 minutes. After the last wash, the bacteria were resuspended in PBS containing a secondary Goat anti-Mouse Fc AF488 antibody (1/400 dilution from stock), and incubated for 25 minutes at room temperature and protected from light. The bacteria were then washed three times with PBS by spinning them at 4000 RPM for 5 minutes. After the last wash, the bacteria were resuspended in PBS and data were acquired using the NovoCyte® flow cytometer (ACEA Biosciences, Inc.), and analyzed using the MFI FlowJo™ software (Tree Star, Inc.).

[1237] To evaluate the results by flow cytometry, the highest dilution with signal in all groups was chosen (the 1250× serum dilution), and the corresponding mean fluorescence intensity (MFI) values were plotted. The limit of detection (LOD) was chosen at an MFI of 1000, as that is the MFI obtained without staining, as well as with background staining with Goat anti-Mouse Fc AF488 antibody only. Therefore, an MFI greater than 1000 was considered a positive signal, and everything equal to or under this value was considered a negative result, despite having an MFI value.

[1238] The results of this assay revealed a high MFI titer of anti-S. typhimurium serum antibodies from mice treated with 3×10⁶ CFUs of the YS1646 strain (MFI of 29196.3±20730), in line with previously published data that YS1646 is able to generate serum antibodies (that are non-neutralizing). Fewer antibodies were detected in the mice treated with the YS1646Δasd/ΔFLG strain (MFI of 11257±9290), which can be due to the lack of adjuvant activity from the flagella. In the mice treated with the YS1646Δasd/ΔpagP strain, significantly fewer antibodies were generated (MFI of 4494±3861), as compared to strain YS1646 (p=0.033), which can be due to the altered LPS surface coating. The most significant reduction in serum antibodies was demonstrated in the YS1646Δasd/ΔFLG/ΔpagP treatment group (MFI of 1930±2445), where several of the mice had MFI titers under 1000, and were thus considered negative for serum antibodies (p=0.021, vs. strain YS1646). Thus, the combined deletions of the flagella and the pagP gene enable both improved safety, as well as significantly reduced immunogenicity, which will enable repeat dosing of high CFUs in humans.

pagP and Flagella Deleted Strains, and their Combination, Demonstrate Significantly Higher Viability in Human Serum Compared to Strain YS1646

[1239] Strain YS1646 exhibits limited tumor colonization in humans after systemic administration. It is shown herein that strain YS1646 is inactivated by complement factors in human blood. To demonstrate this, strains YS1646 and E. coli D10B were compared to exemplary immunostimulatory bacteria provided herein, that contain additional mutations that alter the surface of the bacteria. These exemplary modified strains were YS1646Δasd/ΔpagP, YS1646Δasd/ΔFLG, and YS1646Δasd/ΔFLG/ΔpagP. These three strains, in addition to YS1646 and E. coli D10B cultures, were incubated with serum, or with heat-inactivated (HI) serum, from either pooled mouse blood, or pooled healthy human donors (n=3), for 3 hours at 37° C. After incubation with serum, bacteria were serially diluted and plated on LB agar plates, and the colony forming units (CFUs) were determined.

[1240] In mouse serum, all strains remained 100% viable and were completely resistant to complement inactivation. In human serum, all strains were 100% viable in the heat-inactivated serum. The E. coli D10B strain was completely eliminated after 3 hours in whole human serum. In whole human serum, the YS1646 strain exhibited only 6.37% of live colonies, demonstrating that tumor colonization of the YS1646 clinical strain was limited due to complement inactivation in human blood. For the YS1646Δasd/ΔFLG strain, 31.47% of live colonies remained, and for the YS1646Δasd/ΔpagP strain, 72.9% of live colonies remained, after incubation with human serum for 3 hours. The combined YS1646Δasd/ΔFLG/ΔpagP strain was completely resistant to complement in human serum.

[1241] These data explain why strain YS1646 (VNP20009) has very low tumor colonization when systemically administered. It is shown herein that strain YS1646 is highly sensitive to complement inactivation in human serum, but not in mouse serum. These data explain why limited tumor colonization was observed in humans, while mouse tumors were colonized at a high level. The fljB/fliC or pagP deletions, or the combination of these mutations, partially or completely rescues this phenotype. Thus, the enhanced stability observed in human serum with the YS1646Δasd/ΔpagP, YS1646Δasd/ΔFLG, and YS1646Δasd/ΔFLG/ΔpagP strains provides for increased human tumor colonization.

### Example 6

### Salmonella ansB Gene Knockout Strain Engineering and Characterization

[1242] In this example, the YS1646Δasd/ΔFLG/ΔpagP strain was further modified to delete ansB, the gene encoding bacterial L-asparaginase II. Secretion of L-asparaginase II by S. typhimurium in the presence of T-cells has been shown to directly impair T-cell function, by reducing T-cell receptor (TCR) expression, and impairing cytolytic cytokine production. As a result, bacterially-derived asparaginases have been successfully used to treat acute lymphoblastic leukemia (ALL) for decades. Deletion of ansB from the bacterial genome eliminates the ability of the S. typhimurium strain to produce L-asparaginase II, thereby enhancing the function of T-cells in the bacterially-colonized tumor microenvironment.

ΔansB Strain Construction

[1243] The ansB gene was deleted from the YS1646Δasd/ΔFLG/ΔpagP strain using modifications of the methods described in the preceding examples. Synthetic ansB gene homology arm sequences that contained 236 and 251 bases of the left hand and right hand sequence, respectively, flanking the ansB gene, were synthesized and cloned into a plasmid called pSL0230 (SEQ ID NO:332). A kanamycin gene cassette flanked by cre/loxP sites then was cloned into plasmid pSL0230, and the ansB gene knockout cassette was PCR amplified with primers ansb-1 (SEQ ID NO:319) and ansb-2 (SEQ ID NO:320), gel purified, and introduced into strain YS1646Δasd/ΔFLG/ΔpagP, carrying the temperature sensitive lambda red recombination plasmid pKD46, by electroporation. The kanamycin resistance gene then was cured by Cre-mediated recombination, as described above, and the temperature-sensitive plasmids were cured by growth at non-permissive temperature. The ansB gene knockout sequences were amplified by PCR using primers ansb-3 (SEQ ID NO:321) and ansb-4 (SEQ ID NO:322) (see, Table 1), and verified by DNA sequencing. The resulting mutant derivative of YS1646 was designated YS1646Δasd/ΔFLG/ΔpagP/ΔansB.

Deletion of ansB Eliminates Asparaginase Activity In Vitro

[1244] In order to determine whether the YS1646Δasd/ΔFLG/ΔpagP/ΔansB strain produced less L-asparaginase II, cultures of this strain, along with the ansB-intact YS1646Δasd/ΔFLG/ΔpagP strain, were grown in LB and allowed to reach stationary phase. At this time, 50 μL of conditioned media from the cultures was analyzed for asparaginase activity, using a colorimetric Asparaginase assay kit (Sigma-Aldrich), per the manufacturer's instructions. After a 40 minute incubation, the absorbance units were read on a SpectraMax® M3 Spectrophotometer (Molecular Devices) at an absorbance wavelength of 570 nm.

[1245] Compared to the recombinant L-asparaginase II positive control, which gave an absorbance of 1.95, the absorbance of the ansB-intact YS1646Δasd/ΔFLG/ΔpagP strain was 0.82. Deletion of ansB, in the YS1646Δasd/ΔFLG/ΔpagP/ΔansB strain, however, resulted in background levels of asparaginase activity, detected at an absorbance of 0.109. These data confirm that the ΔansB mutation completely eliminates asparaginase activity.

Deletion of ansB Restores T-Cell Function in an In Vitro Co-Culture Assay

[1246] In order to functionally characterize the ansB-deleted strain for the impact of reduced L-asparaginase II activity on T-cells, a co-culture assay was established using strain-infected murine primary bone marrow-derived macrophages (BMMs) in culture with splenic purified T-cells. For this assay, spleens from healthy BALB/c mice were isolated and dissociated, and splenic CD4⁺ and CD8⁺ T-cells were isolated using a mouse T-cell isolation kit (StemCell Technologies), per the manufacturer's instructions. From the isolated T-cells, 2e5 cells were added per well to a Flat-bottom 96-well plate that had been previously coated with 5 μg/ml of an anti-mouse CD38 antibody (clone 145-2C11, Thermo Fisher Scientific). Conditioned LB media from the YS1646Δasd/ΔFLG/ΔpagP and YS1646Δasd/ΔFLG/ΔpagP/ΔansB cultures, grown to stationary phase, were filtered through a 0.45 μM nylon mesh and added to the T-cells, with or without the addition of 10 μg/ml of an agonistic anti-CD28 antibody for co-stimulation. Control groups containing recombinant asparaginase at 20 U/mL, and normal culture media, were used as controls in the assay. The plate was incubated at 37° C. in a 5% CO₂ incubator. At 24 hours post-incubation, 100 μL of the co-culture supernatants were harvested from the wells, and a murine Th1-specific cytokine bead array (CBA, BioLegend) was performed. Concurrently, T-cells were harvested and analyzed for surface T-cell receptor β (TCRβ) expression on CD4⁺ and CD8⁺ T-cells by flow cytometry, as well as for intracellular staining of IFNγ, TNFα, and IL-2.

[1247] The results confirmed that the ansB-intact strain (YS1646Δasd/ΔFLG/ΔpagP) used to infect the macrophages, and subsequently co-cultured with T-cells, induces profound T-cell immunosuppression. This was exhibited by marked downregulation of TCRβ surface expression in both CD4⁺ and CD8⁺ T-cells (see table below), compared to media control, and to the positive control of recombinant asparaginase at a concentration of 20 U/mL. Deletion of ansB in the YS1646Δasd/ΔFLG/ΔpagP/ΔansB strain significantly restored TCRβ surface expression in both CD4+(p=0.004) and CD8⁺ T-cells (p=0.002), as compared to the parental YS1646Δasd/ΔFLG/ΔpagP strain.

TCRβ Expression
(MFI Mean ± SD)

| Treatment | CD4⁺ T-Cells | CD8⁺ T-Cells |
|---|---|---|
| Media control | 8141.0 ± 405.9 | 12655.0 ± 534.6 |
| Strain YS1646Δasd/ | 3817.0 ± 200.8 | 6492.0 ± 260.2 |
| ΔFLG/ΔpagP | | |
| Strain YS1646Δasd/ | 7047.5 ± 204.4 | 13350.0 ± 339.4 |
| ΔFLG/ΔpagP/ΔansB | | |
| Recombinant | 4253.5 ± 576.3 | 6305.0 ± 687.3 |
| asparaginase II | | |
| (20 U/mL) | | |

SD = Standard deviation

[1248] T-cell secretion of cytokines, 24 hours after co-culture, was measured as a marker of T-cell cytolytic function. As shown in the table below, T-cell production of the cytokines IFNγ, TNFα, and IL-2 was markedly lower after treatment with the YS1646Δasd/ΔFLG/ΔpagP strain, as compared to the media control, and was significantly restored by ansB deletion in the YS1646Δasd/ΔFLG/ΔpagP/ΔansB strain (IFNγ (p=0.05), TNFα (p=0.012), and IL-2 (p=0.006)). These data indicate that deletion of ansB in the YS1646Δasd/ΔFLG/ΔpagP/ΔansB strain significantly restores T-cell cytolytic function, as compared to the parental YS1646Δasd/ΔFLG/ΔpagP strain.

| | T-Cell Cytokine Expression | | |
|---|---|---|---|
| | (pg/mL, Mean ± SD) | | |
| Treatment | IFNγ | TNFα | IL-2 |
| Media control | 4176.1 ± 20.8 | 136.0 ± 11.1 | 3118.2 ± 154.3 |
| YS1646Δasd/ | 238.1 ± 0.6 | 35.7 ± 7.1 | 134.9 ± 12.7 |
| ΔFLG/ΔpagP | | | |
| YS1646Δasd/ | 1788.9 ± 515.5 | 120.5 ± 11.2 | 1947.6 ± 190.5 |
| ΔFLG/ΔpagP/ | | | |
| ΔansB | | | |
| Recombinant | 166.2 ± 19.7 | 33.2 ± 3.4 | 114.5 ± 4.8 |
| asparaginase II | | | |
| (20 U/mL) | | | |

SD = Standard deviation

Deletion of ansB Restores Tumor-Resident T-Cell TCRβ Expression In Vivo

[1249] In in vitro co-culture assays, expression of ansB demonstrated immunosuppressive effects on T-cell function, including downregulation of TCRβ on T-cells by flow cytometry. In order to assess whether this would similarly occur in vivo, the MC38 mouse model of colorectal cancer was utilized.

[1250] For this experiment, 6-8 week-old female C57BL/6 mice (4 mice per group) were inoculated SC in the right flank with MC38 cells (5×10⁵ cells in 100 μL PBS). Mice bearing large established flank tumors were IV injected on day 17 with 1×10⁷ CFUs of the YS1646Δasd/ΔFLG-mCherry strain. Tumors were resected 7 days post IV dosing, and cut into 2-3 mm pieces into gentleMACS™ C tubes (Miltenyi Biotec) filled with 2.5 mL enzyme mix (RPMI-1640 containing 10% FBS with 1 mg/mL Collagenase IV and 20 μg/mL DNase I). The tumor pieces were dissociated using OctoMACS™ (Miltenyi Biotec) specific dissociation program (mouse implanted tumors), and the whole cell preparation was incubated with agitation for 45 minutes at 37° C. After 45 minutes of incubation, a second round of dissociation was performed using the OctoMACS™ (mouse implanted tumor) program, and the resulting single cell suspensions were filtered through a 70 μM nylon mesh into a 50 mL tube. The nylon mesh was washed once with 5 mL of RPMI-1640+10% FBS, and the cells were filtered a second time using a new 70 μM nylon mesh, into a new 50 mL tube. The nylon mesh was washed with 5 mL of RPMI-1640+10% FBS, and the filtered cells were then centrifuged at 1000 RPM for 7 minutes. The resulting dissociated cells were resuspended in PBS and kept on ice before the staining process.

[1251] For the flow-cytometry staining, 100 μL of the single cell suspensions were seeded in wells of a V-bottom 96-well plate. PBS containing a dead/live stain (Zombie Aqua™, BioLegend) and Fc Blocking reagents (BD Biosciences) were added at 100 μL per well, and the cells were incubated on ice for 30 minutes in the dark. After 30 minutes, the cells were washed twice with PBS+2% FBS by centrifugation at 1300 RPM for 3 minutes. Cells were then resuspended in PBS+2% FBS containing fluorochrome-conjugated antibodies (CD45 BV570 clone 30-F11; TCRβ PE clone H57-597; and CD4 FITC clone RM4-5; all from BioLegend) and DAPI (BioLegend), and incubated on ice for 30 minutes in the dark. After 30 minutes, the cells were washed twice with PBS+2% FBS by centrifugation at 1300 RPM for 3 minutes, and resuspended in flow cytometry fixation buffer (Thermo Fisher Scientific). Flow cytometry data were acquired using the ACEA NovoCyte® flow cytometer (ACEA Biosciences, Inc.), and analyzed using the FlowJo™ software (Tree Star, Inc.).

[1252] As shown in the table below, the average mean fluorescence intensity (MFI) for the surface expression of TCRβ on tumor-infiltrating CD4⁺ T-cells, following their interaction within tumors with the colonized parental YS1646Δasd/ΔFLG/ΔpagP strain, was significantly lower than with the ansB-deleted YS1646Δasd/ΔFLG/ΔpagP/ΔansB strain (p=0.042), which was higher than even the PBS control-treated mice.

| | MFI for TCRβ Expression on Tumor- | | |
|---|---|---|---|
| | Infiltrating CD4⁺ T-Cells | | |
| | | | YS1646Δasd/ |
| | | YS1646Δasd/ | ΔFLG/ΔpagP/ |
| | PBS | ΔFLG/ΔpagP | ΔansB |
| | 13980 | 13933 | 14412 |
| | 14543 | 13480 | 14957 |
| | 14177 | 12087 | 14844 |
| | 13931 | 14010 | 14233 |
| AVG | 14157.8 | 13377.5 | 14611.5 |
| SD | 278.0 | 891.5 | 344.7 |

MFI = mean fluorescence intensity;
AVG = average;
SD = standard deviation

[1253] Taken together, these data confirm the necessity of deleting the ansB gene in order to restore T-cell function, due to the bacterial production of immunosuppressive L-asparaginase II, and demonstrate the enhanced T-cell function observed with the ansB deletion in the YS1646Δasd/ΔFLG/ΔpagP/ΔansB strain.

### Example 7

### Salmonella csgD Gene Knockout Strain Engineering and Characterization

[1254] The YS1646Δasd/ΔFLG/ΔpagP/ΔansB strain was further modified to delete csgD, a master gene that controls S. typhimurium curli fimbriae formation, cellulose production, and c-di-GMP production. The csgD gene deletion eliminates the possibility of cellulose-mediated biofilm formation, reduces pro-inflammatory signaling, and enhances uptake by host phagocytic cells. This increase in intracellular localization would thereby enhance the effectiveness of plasmid delivery and immunomodulatory protein production.

ΔcsgD Strain Construction

[1255] The csgD gene was deleted from the YS1646Δasd/ΔFLG/ΔpagP/ΔansB strain, using modifications of the methods described in the preceding examples. Synthetic csgD gene homology arm sequences that contained 207 and 209 bases of the left hand and right hand sequence, respectively, flanking the csgD gene, were synthesized and cloned into a plasmid called pSL0196 (SEQ ID NO:333). A kanamycin gene cassette flanked by cre/loxP sites then was cloned into plasmid pSL0196, and the csgD gene knockout cassette was PCR amplified with primers csgd-1 (SEQ ID NO:323) and csgd-2 (SEQ ID NO:324), gel purified, and introduced into strain YS1646Δasd/ΔFLG/ΔpagP/ΔansB, carrying the temperature sensitive lambda red recombination plasmid pKD46, by electroporation. The kanamycin resistance gene then was cured by Cre-mediated recombination, as described above, and the temperature-sensitive plasmids were cured by growth at non-permissive temperature. The csgD gene knockout sequences were amplified by PCR, using primers csgd-3 (SEQ ID NO:325) and csgd-4 (SEQ ID NO:326), and verified by DNA sequencing. The resulting mutant derivative of parental strain YS1646 was designated YS1646Δasd/ΔFLG/ΔpagP/ΔansB/ΔcsgD.

csgD-Deleted Strains Cannot Form RDAR Colonies on Congo Red Plates

[1256] The ability to form Rough Dry And Red (RDAR) colonies after growth on Congo Red plates is a well-validated assay for bacterial biofilm formation. The Rough and Dry texture occurs through cellulose production, and the red is due to the accumulation of pigment by the curli fimbriae surface structures. For this assay, the YS1646Δasd/ΔFLG/ΔpagP/ΔansB strain was compared to the YS1646Δasd/ΔFLG/ΔpagP/ΔansB/ΔcsgD strain for the ability to form the RDAR phenotype after incubation on Congo Red agar plates.

[1257] Congo Red agar plates were prepared with soytone (10 g/L) and yeast extract (5 g/L) (modified LB without NaCl), and complemented with Congo red (40 mg/L) and Coomassie brilliant blue G-250 (20 mg/L). Five microliters of a stationary phase bacterial culture was spotted onto Congo Red plates, and incubated at 37° C. for 16 hours, then transferred to 30° C. and incubated for an additional 120 hours. Visual analysis of colony morphology and color was performed and recorded daily to confirm presence or absence of the RDAR colony morphotype.

[1258] Comparing the colony morphotypes between the two strains, the YS1646Δasd/ΔFLG/ΔpagP/ΔansB/ΔcsgD strain had a smooth phenotype, and the colonies lacked pigment. In comparison, the YS1646Δasd/ΔFLG/ΔpagP/ΔansB strain, still containing the csgD gene, exhibited the classic rough and dry appearance, and clear evidence of pigment uptake. Thus, the functional assay confirms that the ΔcsgD strain is unable to form biofilms, as it lacks curli fimbriae and cellulose production.

csgD-Deleted Strains Demonstrate Superior Anti-Tumor Efficacy in a Highly Refractory Mouse Model of Triple Negative Breast Cancer

[1259] The impact of the csgD deletion in models where the immunostimulatory bacterial therapy colonizes tumors, but has shown limited efficacy, was assessed. This can indicate the presence of bacterially-produced cellulose that can limit uptake into tumor-resident myeloid cells, thereby limiting therapeutic benefit (see, e.g., Crull et al. (2011) Cellular Microbiology 13(8):1223-1233). The difficult-to-treat EMT6 model was utilized, which is a representative model of human triple negative breast cancer (see, e.g., Yu et al. (2018) PLoS ONE 13(11):e0206223). When EMT6 tumor cells are administered orthotopically into the mammary fat pad, as opposed to subcutaneously in the flank, the model is T-cell excluded, highly metastatic, and highly refractory to immunotherapy, including to all approved checkpoint antibodies (see, e.g., Mariathasan et al. (2018) Nature 554:544-548).

[1260] For this experiment, 6-8 week-old female BALB/c mice (5 mice per group) were inoculated in the left mammary fat pad with EMT6 tumor cells (ATCC #CRL-2755) (2×10⁵ cells in 100 μL PBS). Mice bearing 13 day-old established mammary tumors (˜55 mm³ in volume) were IV injected with a single dose of 1×10⁷ CFUs of the csgD-deleted YS1646Δasd/ΔFLG/ΔpagP/ΔansB/ΔcsgD strain, or the parental YS1646Δasd/ΔFLG/ΔpagP/ΔansB strain, and compared to PBS control. The bacterial strains contained a plasmid encoding a constitutively active murine STING (EF-1α muSTING R283G).

[1261] The tumors in the PBS-treated mice grew evenly, reaching a max tumor volume at day 35 (1199.0±298.1 mm³). Mice treated with the csgD-intact strain, YS1646Δasd/ΔFLG/ΔpagP/ΔansB, did not demonstrate evidence of anti-tumor efficacy in this model, also reaching max tumor volume at day 35 (1689.1±537.0). Ex vivo LB plating of these tumors revealed all tumors to be colonized. However, the csgD-deleted strain, YS1646Δasd/ΔFLG/ΔpagP/ΔansB/ΔcsgD, resulted in 3 out of 5 mice being completely cured of both their primary and any metastatic disease (day 60+). Overall tumor growth inhibition (TGI) was 45.7%, with one of the other two remaining tumors partially responding before eventually growing out. The two bacterial strains contained the same plasmid payload, yet only one demonstrated significant anti-tumor efficacy. Thus, in one of the most intractable and highly metastatic syngeneic tumor models, orthotopic EMT6, a strain with a csgD deletion was able to induce systemic anti-tumor efficacy, and result in 60% complete responses.

csgD-Deleted Strains Demonstrate Enhanced Intracellular Uptake In Vivo

[1262] In order to determine whether the csgD-deleted strain demonstrated improved efficacy because of greater bacterial uptake into tumor-resident myeloid cells, an ex vivo gentamicin protection assay was performed (see, e.g., Crull et al. (2011) Cellular Microbiology 13(8):1223-1233). For this experiment, 6-8 week-old female C57BL/6 mice (4 mice per group) were inoculated SC in the right flank with MC38 cells (5×10⁵ cells in 100 μL PBS). Mice bearing large established flank tumors were IV injected on day 17 with 1×107 CFUs of the csgD-deleted YS1646Δasd/ΔFLG/ΔpagP/ΔansB/ΔcsgD strain (N=12), or the parental YS1646 strain (N=4). Tumors were resected 7 days post IV dosing, weighed, and minced in RPMI supplemented with 1 mg/mL collagenase IV and 20 mg/mL DNase I, and incubated with shaking at 37° C. for 30 minutes, to generate a single cell suspension. After 30 minutes, the suspension was passed through a 70 mm filter, and the recovered volume was divided into two separate, identical samples. Gentamicin (Thermo Fisher Scientific) was added at a concentration of 200 mg/mL to one of each of the paired samples to kill extracellular bacteria, and the samples were incubated with shaking at 37° C. for 90 minutes. Cell suspension samples were then washed and lysed with 0.05% Triton X, and plated on LB agar plates to enumerate for CFUs.

[1263] The results demonstrate that, compared to the CFUs from YS1646-treated tumors without gentamicin treatment (11925±19859 CFUs), gentamicin treatment resulted in very few CFUs detected from the tumors (51±45 CFUs). This indicates that the bacteria reside largely extracellularly in these tumors, and are thus sensitive to gentamicin elimination. In the csgD-deleted YS1646Δasd/ΔFLG/ΔpagP/ΔansB/ΔcsgD treatment group, the non-gentamicin treated tumors yielded high CFUs, as expected from well-colonized tumors, and treatment with gentamicin yielded less CFUs (1276±2410 CFUs), and much more than in the parental YS1646 strain-treated tumors. This is due to more of the csgD⁻ deleted bacteria residing intracellularly, and thus, being protected from gentamicin. These data demonstrate that the csgD deletion improves intracellular uptake of the bacteria, which can enhance plasmid delivery of immunomodulatory proteins in vivo.

### Example 8

### pATI-1.75 and pATI-1.76 Vector Construction

[1264] A plasmid was designed and synthesized that contains the following features: a pBR322 origin of replication, the asd gene, a kanamycin resistance gene flanked by HindIII sites for curing, and a multiple cloning site for expression cassette insertion. The expression cassette is composed of multiple elements, including eukaryotic promoters, open reading frames (ORFs), post-transcriptional regulatory elements, and polyadenylation signals, that are assembled in various configurations.

[1265] Exemplary promoters include the human cytomegalovirus (CMV) immediate early core promoter encoded directly downstream of the CMV immediate early enhancer sequence, and the core promoter for human elongation factor-1 alpha (EF-1α). Open reading frames (ORFs) can include one or more sequences that each are translated into a protein, and can be separated into distinct polypeptides by insertion of a 2A sequence, whereby eukaryotic ribosomes fail to insert a peptide bond between Gly and Pro residues within the 2A sequence. Examples of 2A sequences are the T2A peptide (see, e.g., SEQ ID NO:327) from the Thosea asigna virus (TaV) capsid protein, and the P2A peptide (see, e.g., SEQ ID NO:328) from porcine teschovirus (PTV). Upstream furin cleavage sites (RRKR), and other enhancer elements, are placed upstream to facilitate cleavage to separate the expressed proteins.

[1266] Examples of post-transcriptional regulatory elements (PREs) include the Woodchuck Hepatitis virus PRE (WPRE; SEQ ID NO:346) and the Hepatitis B virus PRE (HPRE; SEQ ID NO:347), which increase accumulation of the cytoplasmic mRNA of a gene by promoting mRNA nuclear export to the cytoplasm, enhancing 3′ end processing and stability. Examples of polyadenylation signal sequences include the SV40 polyadenylation (SV40polyA, or SV40pA) signal, and the bovine growth hormone polyadenylation (bGHpolyA, or bGHpA) signal, both of which are 3′ regulatory elements that serve to promote transcriptional termination, and contain the sequence motif recognized by the RNA cleavage complex.

[1267] FIGS. 1A-C depict the pATI-1.75 and pATI-1.76 (FIGS. 1A and 1i, respectively) plasmid inserts; FIG. 1C shows that the Shine-Dalgarno sequence is replaced with a Kozak sequence for translation in eukaryotic cells, such as myeloid cells. Plasmids with such sequences and constructions can be used in embodiments in which the bacteria are designed to deliver RNA, which cannot be translated by the bacterial host, but can be translated in vivo in a eukaryote.

### Example 9

### Designed Heterologous Protein Expression Plasmids Induce Functional Protein Production from Human Cells

### Optimal Expression of Cytokines Established in Human Cells

[1268] In order to exemplify that immunostimulatory cytokines can be expressed from designed plasmids in human cells, a panel of cytokines were cloned into the pATI-1.75 plasmid under the control of the EF-1α promoter. The cytokines include, but are not limited to, murine IL-2 (muIL-2), muIL-12p70, muIL-23, and human IL-2 (huIL-2). For the muIL-15 Receptor-α fused to an IL-15 single chain (muIL-15Rα-IL-15sc), an EF-1α and CMV promoter were tested. HEK293T STING Null cells (InvivoGen) were seeded in 24-well plates coated with poly-L-lysine at 200,000 cells per well, overnight at 37° C. in a 5% CO₂ incubator, to achieve 80% confluency. The following day, 200 ng of each cytokine plasmid DNA was diluted in serum-free media, and added to FuGENE® transfection reagent (Promega), at the proper reagent:DNA ratios, with untransfected wells as negative controls (in duplicates). Cell culture supernatants from each sample were collected at 24 hours post-transfection, and assessed for protein expression by ELISAs specific for each cytokine.

[1269] The muIL-2 construct was evaluated in a murine IL-2 ELISA (R&D Systems), according to the manufacturer's instructions, and an additional version of muIL-2 with codon optimization (muIL-2 CO) also was evaluated. Concentrations of neat supernatant were tested, and yielded an average of 1680 μg/mL of muIL-2 for the muIL-2 construct, and 1812 μg/mL of muIL-2 for the muIL-2 CO construct. These data confirmed the functionality of the constructs, and demonstrated that yield could be improved with codon optimization. The muIL-12p70 construct was evaluated in a murine IL-12 ELISA (R&D Systems), according to the manufacturer's protocol. When supernatants were added neat, a mean of 400 μg/mL of secreted muIL-12p70 was measured, although this was outside the linear range. When the supernatants were diluted 5-fold, an average of 105 μg/mL of secreted muIL-12p70 was detected. For the muIL-23 plasmid, detection of protein was achieved using the murine IL-23 ELISA (BioLegend), per kit instructions. With the supernatant added neat, a mean of 966 μg/mL of muIL-23 was detected. For the human IL-2 plasmid, detection of protein was achieved using the human IL-2 ELISA (Invitrogen), per kit instructions. With the supernatant added neat, an average of 1422 μg/mL of huIL-2 was detected.

[1270] For the muIL-15Rα-IL-15sc construct, expressed using either the EF-1α or CMV promoters, the murine IL-15 ELISA (eBioscience, Inc.) was used, per kit instructions. When added neat, the muIL-15Rα-IL-15sc plasmid with the EF-1α promoter resulted in an average of 131 μg/mL, while the muIL-15Rα-IL-15sc plasmid with the CMV promoter resulted in an average of 289 μg/mL.

[1271] These data validate the plasmid expression constructs encoding immunomodulatory cytokines, both mouse and human, in human cells. Further, they indicate that codon optimization, and the use of promoters such as CMV, can enhance protein expression.

### Post-Transcriptional Regulatory Elements Enhance Cytokine Expression

[1272] In order to determine whether post-transcriptional regulatory elements (PREs), added at the 3′ end of the ORF, enhance expression of immunostimulatory cytokines in human cells, expression of huIL-2, under the control of the EF-1α promoter, was tested with or without the addition of a Woodchuck Hepatitis virus post-transcriptional regulatory element (WPRE) in the pATI-1.75 plasmid. HEK293T STING Null cells (InvivoGen) were seeded in 24-well plates coated with poly-L-lysine at 200,000 cells per well, overnight at 37° C. in a 5% CO₂ incubator, to achieve 80% confluency. The following day, 200 ng of each cytokine plasmid DNA was diluted in serum-free media and added to FuGENE® transfection reagent (Promega), at the proper reagent:DNA ratios, with untransfected wells as negative controls (in duplicates). Cell culture supernatants from each sample were collected at 24 hours post-transfection and assessed for activity by a human IL-2 ELISA (Invitrogen), according to the manufacturer's instructions. Supernatants were added neat, or were diluted 5-fold.

[1273] The results demonstrated that, when supernatant was added neat, compared to the huIL-2 construct without a WPRE, which secreted an average of 1540 μg/mL, the huIL-2 construct with the WPRE secreted 5511 μg/mL, a 3.6-fold increase. In the 5-fold diluted supernatants, the non-WPRE huIL-2 construct secreted 315 μg/mL of huIL-2, while the huIL-2 construct with the WPRE secreted 1441 μg/mL, a 4.6-fold increase. Thus, addition of 3′ post-transcriptional regulatory elements, exemplified by, but not limited to, WPRE, can significantly improve protein expression in human cells.

### Promoter Optimization and Post-Transcriptional Regulatory Elements Enhance Cytokine Production in Primary M2 Macrophages

[1274] While expression of cytokines, such as muIL-15Rα-IL-15sc, was enhanced in human HEK293T cells by use of the CMV promoter, it was determined whether expression of cytokines could similarly be enhanced in donor-derived primary human M2 macrophages, the predominant macrophage phenotype in T-cell excluded, solid human tumors. Additionally, it was determined whether post-transcriptional regulatory elements, such as WPRE, could enhance expression in these cells.

[1275] In order to determine if protein expression could be improved, the promoters EF-1α and CMV were tested for controlling expression of muIL-2, and the WPRE post-transcriptional regulatory element was tested for expression of huIL-2. Frozen human PBMCs, isolated from healthy human donors, were thawed in complete medium (RPMI-1640+1× non-essential amino acids+5% Human AB serum), and washed by centrifugation for 10 minutes at 800 RPM at room temperature. PBMCs were resuspended in PBS+2% FBS, and monocytes were negatively isolated using a CD16 depletion kit (StemCell Technologies). The isolated monocytes were cultured for 6 days in RPMI media containing M-CSF and IL-4, to generate M2 macrophages. For this, isolated untouched monocytes were washed by centrifugation in PBS+2% FBS, and resuspended in complete medium containing 100 ng/mL human M-CSF and 10 ng/mL human IL-4. Isolated monocytes (3e5 per well) were then seeded in a 24-well plate with a final volume of 750 microliters. Two days after the seeding, the cell culture media was entirely aspirated and replaced with fresh complete medium containing 100 ng/mL human M-CSF and 10 ng/mL human IL-4. Two days later (on day 4), 500 μL of complete medium containing 100 ng/mL human M-CSF and 10 ng/mL human IL-4 was added per well, and incubated for 48 hours. On day 6, the cell culture media was entirely aspirated, and replaced with fresh complete medium without cytokines, for transfection with the Viromer® RED mRNA and plasmid transfection reagent (Lipocalyx).

[1276] Transfection with Viromer® RED was performed according to the manufacturer's instructions. Briefly, 500 ng of plasmid DNA, containing the EF-1α-muIL-2 construct, the CMV-muIL-2 construct, the EF-1α-huIL-2 construct, or the EF-1α-huIL-2+WPRE construct, as well as untransfected control, were diluted in the provided buffer, and mixed with 0.2 μL of Viromer® RED, and incubated at room temperature for 15 minutes to allow the DNA/Viromer® RED complexes to form. The DNA/Viromer® RED complexes were then slowly added to each well of the 24-well plate (in duplicates), and the plate was incubated at 37° C. in a CO₂ incubator for 24 hours. Supernatants were harvested at 24 hours, and assayed for cytokines using either a murine IL-2 ELISA (R&D Systems), or a human IL-2 ELISA (Invitrogen), per kit instructions.

[1277] The results demonstrated that expression of muIL-2 from neat supernatants harvested from primary human M2 macrophages, transfected with the muIL-2 construct under control of the EF-1α promoter, resulted in the secretion of an average of 59.7 μg/mL of muIL-2. The muIL-2 construct with the CMV promoter yielded an average of 275 μg/mL muIL-2, an almost 5-fold increase. For the human IL-2 ELISA, neat supernatants from the cells transfected with the plasmid lacking the WPRE yielded an average of 170 μg/mL huIL-2. The huIL-2 construct containing the WPRE yielded an average of 219 μg/mL huIL-2. These data confirm that promoters such as CMV, and post-transcriptional regulatory elements such as WPRE, can significantly improve cytokine expression in multiple cells types, including primary human M2 macrophages.

Co-Stimulatory Receptor Ligand 4-1BBL Expressed from Human Cells

[1278] Co-stimulatory molecules, such as 4-1BBL, when expressed on antigen-presenting cells (APCs), can engage 4-1BB expressed on T-cells to promote optimal T-cell function. 4-1BBL is negatively regulated by its cytoplasmic signaling domain. In the late-phase of 4-1BBL ligation of macrophages to T-cells, reverse signaling of the 4-1BBL cytoplasmic domain induces surface translocation of 4-1BBL to bind and form a signaling complex with TLR4. This induces high levels of TNF-α, comparable to LPS activation of TLR4, that leads to immunosuppression of the adaptive immune response (see, e.g., Ma et al. (2013) Sci. Signal. 6(295):ra87).

[1279] In this example, the sequence encoding murine 4-1BBL was cloned into the pATI-1.75 vector. In order to maximally engage T-cells, the reverse signaling of the 4-1BBL cytoplasmic domain was eliminated by deleting the cytoplasmic domain (corresponding to amino acid residues 1-82 of SEQ ID NO:344), generating mu4-1BBLΔcyt. To determine whether mu4-1BBLΔcyt could be functionally expressed on the surface of human cells, HEK-293T cells were utilized. HEK293T STING Null cells (InvivoGen) were seeded in 24-well plates coated with poly-L-lysine at 200,000 cells per well, overnight at 37° C. in a CO₂ incubator, to achieve 80% confluency. The following day, 200 ng of plasmid DNA, encoding mu4-1BBLΔcyt, was diluted in serum-free media and added to FuGENE® transfection reagent (Promega), at the proper reagent:DNA ratio, with untransfected wells as a negative control (in duplicates). After 48 hours, the cells were washed twice with PBS+2% FBS by centrifugation at 1300 RPM for 3 minutes. The cells were then resuspended in PBS+2% FBS, and stained with a PE-conjugated murine anti-4-1BBL antibody (clone TKS-1, BioLegend) and DAPI (dead/live stain). After 30 minutes, the cells were washed twice with PBS+2% FBS by centrifugation at 1300 RPM for 3 minutes, and resuspended in PBS+2% FBS. Flow cytometry data were acquired using the ACEA NovoCyte® flow cytometer (ACEA Biosciences, Inc.), and analyzed using the FlowJo™ software (Tree Star, Inc.).

[1280] As a percentage of live cells, the untransfected control cells showed a percent positive staining for murine 4-1BBL of 14.6. In comparison, 93.4% of the cells that were transfected with the plasmid encoding mu4-1BBLΔcyt, were positive for surface expression of 4-1BBL. These data demonstrate that the pATI-1.75 plasmid can effectively be used to express 4-1BBL at high levels on the surface of human cells.

Soluble TGFβ Receptor II Expressed from Human Cells

[1281] Soluble mouse TGFβ receptor II variants were designed by removing the cytoplasmic and transmembrane portions of the full TGFβ receptor II. Additionally, either a FLAG or Fc tag was added for detection. These variants were cloned into the pATI-1.75 vector under the control of a CMV promoter and a 3′ WPRE. The sequences were confirmed by Sanger sequencing. 1.5×10⁶ HEK293T cells were plated one day prior on 6-well plates coated with poly-L-lysine, to achieve 80% confluency. On the day of transfection, 3 μg of DNA was diluted in serum-free media and added to FuGENE® transfection reagent (Promega) at the proper reagent:DNA ratios. Cell culture supernatants from each sample were collected after 48 hours of incubation. Some supernatant was concentrated in a 10 kDa spin column (Millipore). Direct ELISAs with mouse TGF-β1 (R&D systems) were performed on the supernatant of transfected HEK293T cells. ELISA data, with absorbance at 450 nm, is provided in the table below.

| Construct | Absorbance at 450 nm |
|---|---|
| Concentrated soluble mouse TGFβ receptor II Fc | 1.522 ± 0.025 |
| Soluble mouse TGFβ receptor II Fc | 1.508 ± 0.018 |
| Media (control) | 0.041 ± 0.002 |

[1282] The functionality of these constructs was tested in a T-cell assay. Mouse T-cells were harvested from the spleen using a magnetic isolation kit (StemCell Technologies). T-cells were incubated with anti-mouse CD3F antibody, with or without the soluble receptor, at various concentrations of mouse TGF-beta. T-cell activation was quantified using the mouse TH1 CBA kit (BioLegend), and flow cytometry labeling of CD4, CD8, 4-1BB, and CD69.

[1283] These data demonstrate the ability to express heterologous molecules, such as extracellular receptors fused to an Fc domain, from the plasmid engineered for delivery by the immunostimulatory bacteria to eukaryotic, such as human, cells.

Expression of a CD3×CD19 Bispecific T-Cell Engager from Human Cells

[1284] A CD3×CD19 bispecific T-cell engager (BiTE®), containing a FLAG tag and a His tag, was cloned into the pATI-1.75 vector under the control of a CMV promoter and with a 3′ WPRE. The sequences were confirmed by Sanger sequencing. 1.5×10⁶ HEK293T cells were plated one day prior on 6-well plates coated with poly-L-lysine, to achieve 80% confluency. On the day of transfection, 3 μg of DNA was diluted in serum-free media and added to FuGENE® transfection reagent (Promega), at the proper reagent:DNA ratios. Cell culture supernatants from each sample were collected after 48 hours of incubation. Some supernatant was concentrated in a 10 kDa spin column (Millipore).

[1285] The functionality of this construct was tested by binding of the CD3×CD19 BiTE® to Raji and Jurkat-Lucia™ NFAT cells (InvivoGen). The BiTE® was detected using an anti-FLAG-APC (BioLegend), using flow cytometry. One well of 50,000 cells was run for each condition. The mean fluorescence intensity (MFI) of the APC positive events, and the number of cells gated as APC positive, are provided in the table below.

| | | Mean Fluorescence |
|---|---|---|
| | Number of | Intensity (MFI) of |
| Sample | APC⁺ Cells | APC⁺ Cells |
| Raji cells with anti-FLAG-APC | 41 | 1439 |
| only | | |
| Raji cells with CD3 × CD19 | 10307 | 7408 |
| BiTE ® | | |
| Raji cells with concentrated | 11248 | 16045 |
| CD3 × CD19 BiTE ® | | |
| Jurkat cells with anti-FLAG-APC | 100 | 1519 |
| only | | |
| Jurkat cells with CD3 × CD19 | 18482 | 4584 |
| BiTE ® | | |
| Jurkat cells with concentrated | 17563 | 14089 |
| CD3 × CD19 BiTE ® | | |

[1286] Additionally, this construct was tested in a co-culture of Raji and Jurkat-Lucia™ NFAT cells. Cells were incubated with or without the CD3×CD19 BiTE®, and the luminescence (corresponding to Lucia™ luciferase activity resulting from NFAT activation) was detected at 6 hours and 24 hours post-addition of the BiTE®. The luminescence readings of this assay are provided in the table below.

| | Concentrated | | |
|---|---|---|---|
| | CD3 × CD19 | CD3 × CD19 | |
| | BiTE ® | BiTE ® | Medium |
| Experimental | (Lumines- | (Lumines- | (Lumines- |
| Conditions | cence) | cence) | cence) |
| 2 Raji: 1 | 12110.5 ± 837.9 | 3445.0 ± 717.0 | 44.5 ± 10.6 |
| Jurkat, 6 hour | | | |
| time point | | | |
| 1 Raji: 1 | 4337.0 ± 219.2 | 2057.5 ± 20.5 | 26.0 ± 15.6 |
| Jurkat, 6 hour | | | |
| time point | | | |
| 2 Raji: 1 | 47159.5 ± 1038.7 | 11274 ± 408.7 | 114.5 ± 57.3 |
| Jurkat, 24 hour | | | |
| time point | | | |
| 1 Raji: 1 | 18614 ± 1540.1 | 6017 ± 31.1 | 122 ± 15.6 |
| Jurkat, 24 hour | | | |
| time point | | | |

[1287] These data demonstrate the ability to express heterologous molecules, such as scFvs, alternative antibody constructs, and bispecific T-cell engagers, in eukaryotic, such as human, cells, from the engineered plasmid that can be delivered by the immunostimulatory bacteria herein.

### Example 10

### Immunostimulatory Bacterial Strains Efficiently Deliver Plasmids and Express Cytokines in Human Cells

### Flagella-Deleted Strains Containing Plasmids Encoding Murine IL-2 Induce Functional IL-2 Protein Expression Following Infection in Human Monocytes

[1288] As described above, the flagellin genes fljB and fliC were deleted from the YS1646 strain of S. typhimurium with the asd gene deleted, generating the strain YS1646Δasd/ΔFLG. This strain was electroporated with a plasmid containing an expression cassette with the EF-1α promoter and the murine cytokine IL-2 (muIL-2). In addition, the YS1646Δasd/ΔFLG strain was electroporated with an expression plasmid encoding murine IL-156, as a control for a non-cognate cytokine. Additional constructs were created using the CMV promoter.

[1289] To determine whether these strains containing expression plasmids can infect human monocytes and induce the production of murine IL-2, THP-1 human monocytic cells were plated at 50,000 cells/well in RPMI 1640 (Gibco™)+10% Nu-Serum™ (Corning®), one day prior to infection. The cells were infected with the various strains at an MOI of 50 for one hour in RPMI, then washed 3 times with PBS, and resuspended in RPMI+100 μg/mL gentamicin (Sigma). Supernatants were collected 48 hours later from a 96-well plate, and assessed for the concentration of murine IL-2 by ELISA (R&D Systems).

[1290] The concentration of muIL-2 detected in the YS1646Δasd/ΔFLG-IL-156 control wells was very low (6.52 μg/mL), as expected, and likely reflective of some cross-reactivity to the endogenous human IL-2 receptor. In contrast, the YS1646Δasd/ΔFLG-muIL-2 strain induced an average of 35.1 μg/mL of muIL-2. These data demonstrate the feasibility of expressing and secreting functional heterologous proteins, such as IL-2, from the S. typhimurium immunomodulatory platform strains, in human monocytes.

Flagella-Deleted and pagP-Deleted Strains, Containing Plasmids Encoding Murine IL-2, Demonstrate Enhanced IL-2 Expression, Compared to Transfected muIL-2 DNA, in Primary Human M2 Macrophages

[1291] The relative efficiencies of transfection (i.e., direct transfer of plasmid DNA) vs. bactofection (i.e., transfer of plasmid DNA by the immunostimulatory bacterial strains herein), in primary human M2 macrophages, for expression of muIL-2, were compared. Frozen human PBMCs, isolated from healthy human donors, were thawed in complete medium (RPMI-1640+1× non-essential amino acids+5% Human AB serum), and washed by centrifugation for 10 minutes at 800 RPM at room temperature. PBMCs were resuspended in PBS+2% FBS, and monocytes were negatively isolated using a CD16 depletion kit (StemCell Technologies). Isolated untouched monocytes were then washed by centrifugation in PBS+2% FBS, and resuspended in complete medium containing 100 ng/mL human M-CSF and 10 ng/mL human IL-4. Isolated monocytes (3e5 per well) were then seeded in a 24-well plate, with a final volume of 750 microliters. Two days after the seeding, the cell culture media was entirely aspirated and replaced with fresh complete medium containing 100 ng/mL human M-CSF and 10 ng/mL human IL-4. Two days later (on day 4), 500 μL of complete medium containing 100 ng/mL human M-CSF and 10 ng/mL human IL-4 was added per well, and incubated for 48 hours. On day 6, the cell culture media was entirely aspirated, and replaced with fresh complete medium without cytokines, for transfection with Viromer® RED mRNA and plasmid transfection reagent (Lipocalyx).

[1292] Transfection with Viromer® RED was performed according to the kit instructions. Briefly, 500 ng of plasmid DNA from the constructs encoding muIL-2 under control of the EF-1α promoter (EF-1α-muIL-2), or under control of the CMV promoter (CMV-muIL-2), or untransfected control, were diluted in the provided buffer, mixed with 0.2 μL of Viromer® RED transfection reagent, and incubated at room temperature for 15 minutes to allow the DNA/Viromer® RED complexes to form. The DNA/Viromer® RED complexes were then slowly added to each well of the 24-well plate containing the monocytes (in duplicates), and the plate was incubated at 37° C. in a CO₂ incubator for 24 hours. Additional wells of cells were infected at an MOI of 450 with the YS1646Δasd/ΔFLG/ΔpagP strain containing the EF-1α-muIL-2 construct, or the YS1646Δasd/ΔFLG/ΔpagP strain containing the CMV-muIL-2 construct, for one hour in RPMI, then washed 3 times with PBS, and resuspended in RPMI+100 μg/mL gentamicin (Sigma).

[1293] After 24 hours, the cells were lysed with 350 μL Buffer RLT with β-mercaptoethanol (β-ME) (Qiagen), and RNA extraction was performed using the Qiagen RNeasy® Mini Kit with the following modifications. A genomic DNA elimination step, using an RNase-Free DNase kit (Qiagen) was included in the kit to remove genomic DNA from the total RNA. Total RNA concentration was measured using a NanoDrop™ One^{C} UV-Vis Spectrophotometer (Thermo Fisher Scientific). The purity of each sample also was assessed from the A₂₆₀/A₂₃₀ absorption ratio. RNA was stored at −80° C. without freeze-thawing until reverse-transcription was performed. cDNA synthesis was performed using 0.4-1 μg of template RNA using a C1000 Touch Thermal Cycler (Bio-Rad) and SuperScript™ VILO™ Master Mix (Invitrogen) in a 30 μL reaction, according to the manufacturer's instructions.

[1294] qPCR (quantitative polymerase chain reaction) was performed with a CFX96™ Real-Time PCR Detection System (Bio-Rad). SYBR® primers for murine IL-2 (Assay ID: qMmuCED0060978) were purchased from Bio-Rad. The qPCR reaction (20 μL) was conducted per protocol, using the iTaq™ Universal SYBR® Green Supermix (Bio-Rad). The standard thermocycling program on the Bio-Rad CFX96™ Real-Time System consisted of a 95° C. denaturation for 30 seconds, followed by 40 cycles of 95° C. for 5 seconds and 60° C. for 30 seconds. Reactions with template-free control were included for each set of primers on each plate. All samples were run in duplicate, and the mean C_{q} values were calculated. Quantification of the target mRNA was normalized using Gapdh (glyceraldehyde-3-phosphate dehydrogenase) reference mRNA (Bio-Rad, Assay ID: qMmuCED0027497). ΔC_{q} was calculated as the difference between target (muIL-2) and reference (GAPDH) gene. ΔΔC_{q} was obtained by normalizing the ΔC_{q} values of the treatments, to the ΔC_{q} values of the non-treatment controls. Fold increase was calculated as 2\hat{ }-ΔΔC_{q}. The fold increases relative to untransfected/uninfected control are shown in the table below.

| Treatment Group | Fold Increase in muIL-2 |
|---|---|
| YS1646 | <1 |
| YS1646Δasd/ΔFLG/ΔpagP, | 74 |
| EF-1α-muIL-2 (infection) | |
| YS1646Δasd/ΔFLG/ΔpagP, | 668.2 |
| CMV-muIL-2 (infection) | |
| Transfection, EF-1α-muIL-2 | 249.4 |
| Transfection, CMV-muIL-2 | 1527 |

[1295] The results show that, with either transfection or bactofection, the CMV promoter demonstrated superior expression of muIL-2, compared to the EF-1α promoter, in primary human M2 macrophages. While transfection using the most efficient reagent currently available gave the highest levels of muIL-2 expression, bactofection also elicited high expression levels of muIL-2, demonstrating the high efficacy of heterologous gene transfer with the bacterial platforms provided herein.

### Example 11

### Bacterial Strains Efficiently Deliver Immunomodulatory Plasmids In Vivo and Demonstrate Potent Anti-Tumor Activity

[1296] Flagella-Deleted Strains Containing Plasmids Encoding Murine IL-2 Induce Potent Tumor Inhibition without Toxicity in a Mouse Model of Colorectal Carcinoma

[1297] In order to demonstrate that S. typhimurium strains containing the muIL-2 expression plasmids can induce anti-tumor efficacy without additional toxicity, the YS1646Δasd/ΔFLG strain, containing the muIL-2 plasmid, was compared to PBS control, for safety and efficacy in the subcutaneous flank MC38 colorectal adenocarcinoma model. For this study, 6-8 week-old female C57BL/6 mice (5 mice per group) were inoculated SC in the right flank with MC38 cells (5×10⁵ cells in 100 μL PBS). Mice bearing established flank tumors were IV injected on day 11 with 5×10⁵ CFUs of the YS1646Δasd/ΔFLG-muIL-2 strain, or with PBS vehicle control. Tumor measurements and body weights were recorded twice weekly.

[1298] The results revealed that the YS1646Δasd/ΔFLG-muIL-2 strain demonstrated significant tumor growth inhibition (TGI) compared to PBS (76.7% TGI, P=0.005, day 21), with tumors being well controlled out to day 40 post-implantation, when the PBS mice were euthanized. The therapy was well tolerated, even without further strain attenuation, and the weight loss early on was transient and resulted in only a 3.4% reduction in body weight, compared to PBS control at day 40. Thus, the immunostimulatory strain expressing muIL-2 potently inhibits tumor growth inhibition, in a safe and non-toxic manner, in a model of colorectal carcinoma.

### Flagella-Deleted Strains Containing Plasmids Encoding Murine IL-2 Induce Tumor-Specific Production of IL-2 In Vivo

[1299] The level of tumor muIL-2 expression, relative to spleen, was determined in order to confirm the tumor-specific nature of delivery. 6-8 week-old female C57BL/6 mice (5 mice per group) were inoculated SC in the right flank with MC38 colorectal adenocarcinoma cells (5×10⁵ cells in 100 μL PBS). Mice bearing established flank tumors were IV injected on day 10 with 5×10⁵ CFUs of the YS1646Δasd/ΔFLG-muIL-2 strain, or with PBS vehicle control. On day 31 post tumor implantation, tumors and spleens were excised and processed for tumor extracts using the GentleMACS™ Octo Dissociator and the M tubes (Miltenyi Biotec) molecule setting in 2 mL of PBS. The homogenates were spun down at 1300 RPM for 10 minutes, and the supernatant was collected and assayed using the muIL-2 CBA kit (BD Biosciences), according to the manufacturer's instructions. Results were quantified as pg/mL of muIL-2, and standardized to per gram of tissue.

[1300] The PBS control tumors exhibited background levels of muIL-2 in the tumor, with a mean of 134 μg/mL per gram of tumor tissue. The YS1646Δasd/ΔFLG-muIL-2 treated tumors yielded a much higher mean of 389.9 μg/mL of muIL-2 per gram of tumor tissue, demonstrating the ability to detect elevated muIL-2 levels due to plasmid delivery in the tumor-resident myeloid cells. The level of muIL-2 in the spleen, from mice injected with the YS1646Δasd/ΔFLG-muIL-2 strain, was an average of 6.6 μg/mL per gram of tissue, which was lower than in the PBS controls. This specificity for the tumor enables delivery of immunomodulatory levels of IL-2, in a much safer manner than conventional cytokine therapies, which are not tumor-targeted.

### Attenuated Bacterial Strains Containing Plasmids Encoding Murine Co-Stimulatory Receptor Ligand 4-1BBL Demonstrate Curative Effects In Vivo

[1301] In order to determine whether tumor-specific delivery of a co-stimulatory molecule, such as 4-1BBL, enhances anti-tumor efficacy, a bacterial strain containing a plasmid encoding 4-1BBL(Δcyt) (described above), under control of the CMV promoter and containing a 3′ WPRE, was assessed in the MC38 murine model of colorectal adenocarcinoma. For this study, 6-8 week-old female C57BL/6 mice (5 mice per group) were inoculated SC in the right flank with MC38 colorectal adenocarcinoma cells (5×10⁵ cells in 100 μL PBS). Mice bearing established flank tumors were IV injected on day 10 with 1×10⁷ CFUs of strain YS1646Δasd/ΔFLG/ΔpagP/ΔansB containing the CMV-4-1BBL(Δcyt)-WPRE plasmid, or with PBS vehicle control.

[1302] The therapy was very well tolerated, with only an initial weight loss of 2.2% that had fully recovered 3 days later. Compared to PBS, the 4-1BBL(Δcyt) therapy was highly effective and curative (90.7% TGI, 60% complete response (CR), day 30). These data demonstrate the potency and safety of delivering immunostimulatory bacteria containing plasmids encoding co-stimulatory molecules in a tumor-specific manner.

### Example 12

### Identification of Gain-of-Function Mutations in Genes that Promote Constitutive Type I Interferon Production

[1303] Instances of subjects presenting with severe auto-inflammatory conditions and vasculopathies of unknown etiology occur, and, often derive from mutations. The cause for these conditions has, and can be, identified. Steps to identify a mutational basis for such a pathology are as follows. In step one, intact genomic DNA is obtained from patients experiencing symptoms, and from healthy individuals. Genome sequence is performed, such as whole exome sequencing, and then introns and exons are analyzed. Analysis of genes, and identification of mutations in products in the pathways associated with the expression of type I interferon (IFN), is performed. From this analysis, mutations are discovered in genes known to lead to constitutive functional activation of the encoded proteins, and subsequent persistent expression of type I IFN.

[1304] After identification of mutations, cDNAs encoding the full-length gene, with and without the identified mutation(s), are transfected into a reporter cell line that measures expression of type I IFN. For example, a reporter cell line can be generated where the expression of luciferase is placed under control of the promoter for IFN-β. A gain-of-function (GOF) mutant that is constitutively active will promote the expression of IFN-β, whereas the unstimulated wild-type (WT) protein will not. In the case of known STING SAVI (STING-associated vasculopathy with onset in infancy) mutants, the WT STING stimulation of IFN-β requires the addition of increasing exogenous levels of cGAMP to directly activate WT STING. Constitutively active mutations stimulate the expression of IFN-β in a cGAMP-independent manner. Exemplary gain-of-function mutations in each of STING, RIG-I, MDA5, IRF3, and IRF7 are set forth below in Example 15, and discussed elsewhere herein. Other such genes, in which gain-of-function mutations can be identified in subjects, or produced by in vitro mutation and screening, include, but are not limited to, TRIM56, RIP1, Sec5, TRAF3, TRAF2, TRAF6, STAT1, LGP2, DDX3, DHX9, DDX1, DDX9, DDX21, DHX15, DHX33, DHX36, DDX60, and SNRNP200.

### Expression of Functional Constitutive Type I IFN Mutants in Human Cells

[1305] Human STING (allele R232) and IRF3 gain-of-function (GOF) mutants (see, table below) were cloned into the pATI-1.75 vector, and the sequences were confirmed by PCR. To determine whether the STING and IRF3 GOF expression plasmids could induce functional type I IFN in human cells, the plasmids were assessed using HEK293T STING Null Reporter cells (InvivoGen), which do not contain endogenous STING. These cells express secreted embryonic alkaline phosphatase (SEAP), placed under the control of the endogenous IFN-stimulated response element (ISRE) promoter, where the coding sequence of ISRE has been replaced by the SEAP ORF using knock-in technology. Type I interferon activity can be assessed by monitoring type I IFN-stimulated SEAP production in the cell culture supernatants.

[1306] To test the relative production of type I IFN by each of the GOF mutants, 1×10⁵ 293T-Dual™ Null cells (InvivoGen) were plated one day prior on plates coated with poly-L-lysine, to achieve 80% confluency, in a 24-well plate. On the day of transfection, 200 ng of plasmids encoding a panel of STING and IRF3 GOF mutants, including a STING wild-type (WT) and IRF3 WT control, and a negative control STING mutant that has been reported in the literature to be non-functional in human cells (STING V155R negative control (NC)), were diluted in serum-free media and added to FuGENE® transfection reagent (Promega) at the proper reagent:DNA ratios. Cell culture supernatants from each sample were collected after overnight incubation, and 10 μL of the cell culture supernatants was added to 50 μL QUANTI-Blue™ reagent (InvivoGen), which is used for measuring SEAP. Type I interferon activation was determined by measuring ISRE-induced SEAP activity on a SpectraMax® M3 Spectrophotometer (Molecular Devices), at an absorbance wavelength of 650 nm.

[1307] As shown in the table below, all GOF mutants were able to induce type I IFN activity in a STING ligand-independent manner in human cells, compared to the wild-type and negative controls, which did not induce type I IFN activity. The highest levels of type I IFN induction were observed with the human STING R284G variant, and the human IRF3 S396D phosphomimetic variant. These data support the ability of the plasmids encoding GOF mutants to produce functional, constitutively active STING and constitutively active phosphomimetic IRF3, that can induce type I IFN in a cGAMP-independent manner

| | Mean Absorbance | Standard |
|---|---|---|
| GOF Mutant | (650 nm) | Deviation |
| Plasmid control | 0.049 | ±0.002 |
| huSTING WT | 0.144 | ±0.004 |
| huSTING VI47L | 1.399 | ±0.015 |
| huSTING N154S | 1.382 | ±0.008 |
| huSTING V155M | 1.360 | ±0.048 |
| huSTING C206Y | 1.566 | ±0.121 |
| huSTING R281Q | 1.546 | ±0.132 |
| huSTING R284G | 1.831 | ±0.039 |
| huSTING V155R (NC) | 0.181 | ±0.014 |
| huIRF3 WT | 0.781 | ±0.073 |
| huIRF3 S396D | 1.922 | ±0.131 |

### Infection of Flagella-Deleted Strains, Containing Plasmids Encoding Constitutively Active Type I IFN Mutants, Converts Human M2 Macrophages to Type I IFN-Producing M1 Macrophages

[1308] It was determined if primary human M2 macrophages, infected with flagella-deleted strains containing plasmids encoding constitutively active type I IFN GOF variants, could be converted to producers of type I IFN and downstream chemokines, such as CXCL10 (also known as IP-10).

[1309] Frozen human PBMCs, isolated from healthy human donors, were thawed in complete medium (RPMI-1640+1× non-essential amino acids+5% Human AB serum), and washed by centrifugation for 10 minutes at 800 RPM at room temperature. PBMCs were resuspended in PBS+2% FBS, and monocytes were negatively isolated using a CD16 depletion kit (StemCell Technologies). To generate primary human M2 macrophages, isolated untouched monocytes were washed by centrifugation in PBS+2% FBS, and resuspended in complete medium containing 100 ng/mL human M-CSF and 10 ng/mL human IL-4. Isolated monocytes (3e5 per well) were then seeded in a 24-well plate with a final volume of 750 microliters. Two days after the seeding, the cell culture media was entirely aspirated and replaced with fresh complete medium containing 100 ng/mL human M-CSF and 10 ng/mL human IL-4. Two days later (on day 4), 500 μL of complete medium containing 100 ng/mL human M-CSF and 10 ng/mL human IL-4 was added per well, and incubated for 48 hours. On day 6, the cell culture media was entirely aspirated and replaced with fresh complete medium without cytokines. Duplicate wells were infected at an MOI of 450, for one hour in RPMI, with the following strains: YS1646Δasd/ΔFLG containing a plasmid encoding wild-type (WT) human (hu) STING; YS1646Δasd/ΔFLG containing a plasmid encoding the huSTING R284G variant; YS1646Δasd/ΔFLG containing a plasmid encoding WT huIRF3; YS1646Δasd/ΔFLG containing a plasmid encoding the huIRF3 S396D variant; or a strain containing a plasmid control. The cells were then washed 3 times with PBS, and resuspended in RPMI+100 μg/mL gentamicin (Sigma). As a control, the STING agonist 3′5′ RpRp c-di-AMP (InvivoGen), an analog of the clinical compound ADU-S100, was added to the cells at a concentration of 10 μg/mL.

[1310] After 24 hours, the cells were lysed with 350 μL Buffer RLT with 3-ME (Qiagen), and RNA extraction was performed using the Qiagen RNeasy® Mini Kit with the following modification. A genomic DNA elimination step, using an RNase-Free DNase kit (Qiagen), was included to remove genomic DNA from the total RNA. Total RNA concentration was measured using a NanoDrop™ One^{C} UV-Vis Spectrophotometer (Thermo Scientific). The purity of each sample also was assessed from the A₂₆₀/A₂₃₀ absorption ratio. RNA was stored at −80° C. without freeze-thawing until reverse-transcription was performed. Synthesis of cDNA was performed from 0.4-1 μg of template RNA using a C1000 Touch Thermal Cycler (Bio-Rad) and SuperScript™ VILO™ Master Mix (Invitrogen) in a 30 μL reaction, according to the manufacturer's instructions.

[1311] qPCR was performed with a CFX96™ Real-Time System (Bio-Rad). SYBR® primers for huCXCL10 (qHsaCED0046619), huIRF3 (qHsaCID0013122), huSTING (qHsaCID0010565), and huIFNβ 1 (qHsaCED0046851) were purchased from Bio-Rad. The qPCR reaction (20 μL) was conducted per protocol, using the iTaq™ Universal SYBR® Green Supermix (Bio-Rad). The standard thermocycling program on the BioRad CFX96™ Real-Time System consisted of a 95° C. denaturation for 30 seconds, followed by 40 cycles of 95° C. for 5 seconds and 60° C. for 30 seconds. Reactions with template free control were included for each set of primers on each plate. All samples were run in duplicate, and the mean C_{q} values were calculated. Quantification of the target mRNA was normalized using Gapdh reference mRNA (Bio-Rad, qMmuCED0027497). ΔC_{q} was calculated as the difference between the target and reference gene. ΔΔC_{q} was obtained by normalizing the ΔC_{q} values of the treatments to the ΔC_{q} values of the non-treatment control. Fold increase was calculated as 2\hat{ }-ΔΔC_{q}. The values are shown in the table below, as the average of the duplicate wells.

[1312] As shown in the table below, compared to the infection of the plasmid control, strains of YS1646Δasd/ΔFLG, containing plasmids encoding WT huSTING and huSTING R284G, induced high levels of STING expression, which were significantly higher compared to the plasmid control, or the small molecule STING agonist. Similarly, the strains containing plasmids encoding WT huIRF3 and huIRF3-S396D induced high levels of IRF3 expression, which were significantly higher than the plasmid control, or the small molecule STING agonist. The bacterial strain containing a plasmid encoding the huSTING R284G variant induced much higher expression of IFNβ and CXCL10, as compared to the strain containing a plasmid encoding WT huSTING. This demonstrates the ability of the strain, containing a plasmid encoding a constitutively active STING GOF variant, to convert a human primary, immunosuppressive M2 macrophage, into an M1, type I IFN producing, cell. While the strains containing plasmids encoding WT huIRF3 and huIRF3-S396D both induced more, or similar levels of IFNβ, they induced less CXCL10 than the huSTING-R284G variant.

| | Fold Expression Over Untransfected Control | | | |
|---|---|---|---|---|
| GOF Mutant | STING | IRF3 | IFNβ | CXCL10 |
| Plasmid Control | 22.3 | 0 | ND | ND |
| WT huSTING | 24017.1 | ND | 3.4 | 3934.5 |
| huSTING R284G | 36542.7 | ND | 20 | 23484.5 |
| WT huIRF3 | 22.7 | 478.9 | 17.5 | 10766.2 |
| huIRF3-S396D | 30.8 | 346.4 | 26.3 | 15696.1 |
| 3′5′ RpRp c-di-AMP | 244.8 | 1.11 | 1.77 | 594.1 |

ND = No Data

[1313] These data demonstrate the expression of constitutively active GOF type I IFN variants in human primary M2 macrophages, and converting these cells to M1-like, type I IFN producing, cells.

### Example 13

### Immunostimulatory Bacteria, Containing Plasmids Encoding Constitutive Type I IFN Variants, Demonstrate Potent Anti-Tumor Immunity in a Murine Model of Colorectal Cancer

### Human GOF STING Mutants Show Anti-Tumor Activity in Mouse Models

[1314] To demonstrate that immunostimulatory bacterial strains, containing expression plasmids encoding constitutively active STING variants, induce anti-tumor efficacy, strain YS1646Δasd/ΔFLG (with a knockout of both flagellin genes fljB and fliC) was electroporated with a plasmid containing an expression cassette for human STING with the allele R232 and the GOF mutation V155M (huSTING V155M), behind the human elongation factor-1 alpha (EF-1α) promoter, and was compared to strain YS1646 alone, and to a PBS vehicle control. The gene encoding huSTING V155M was generated using DNA synthesis and cloned into the pATI-1.75 vector. In order to evaluate whether a constitutively active human STING variant could demonstrate anti-tumor activity in mice, 6-8 week-old female C57BL/6 mice (5 mice per group) were inoculated SC in the right flank with MC38 colorectal adenocarcinoma cells (5×10⁵ cells in 100 μL PBS). Mice bearing established flank tumors were IV injected on day 8 with 5×10⁵ CFUs of strain YS1646Δasd/ΔFLG-huSTING V155M, with strain YS1646, or with PBS control.

[1315] The results showed that the YS1646 parental strain was only mildly effective as an anti-tumor therapy, and was not curative (35% TGI, p=NS (not significant), day 28), in line with previously published data. The more attenuated strain, containing a plasmid encoding constitutively active human STING, YS1646Δasd/ΔFLG-huSTING V155M, however, elicited significant tumor control (60% TGI, p<0.05, day 28) compared to PBS, and had a cure rate of 20%. Thus, an immunostimulatory bacterial strain that delivers a constitutively active STING variant potently inhibits tumor growth, and demonstrates curative effects in a model of colorectal adenocarcinoma.

### Murine Phosphomimetic IRF3 Shows Curative Effects In Vivo

[1316] The murine version of the phosphomimetic human IRF3 variant was designed, designated muIRF3-S388D, and evaluated in a murine model of colorectal adenocarcinoma. Strain YS1646Δasd/ΔFLG was electroporated with a plasmid containing an expression cassette for murine IRF3 with the GOF mutation S388D (muIRF3-S388D), behind the human elongation factor-1 alpha (EF-1α) promoter, and was compared to PBS vehicle control. The gene encoding muIRF3-S388D was generated using DNA synthesis and cloned into the pATI-1.75 vector. 6-8 week-old female C57BL/6 mice (5 mice per group) were inoculated SC in the right flank with MC38 colorectal adenocarcinoma cells (5×10⁵ cells in 100 μL PBS). Mice bearing established flank tumors were IV injected on day 10 with 5×10⁵ CFUs of strain YS1646Δasd/ΔFLG-EF-1α-muIRF3-S388D, and compared to PBS vehicle control.

[1317] The therapy was very well tolerated, with an initial weight loss nadir of only 0.3%. Compared to PBS, the bacterial strain containing the plasmid encoding the muIRF3-S388D GOF mutant was highly effective and curative (81.8% TGI, 60% CR, day 42). These data demonstrate the potency and safety of delivering constitutively active type I IFN inducing variants in a tumor-specific manner.

### Murine STING GOF Variants Show Potent and Curative Anti-Tumor Activity

[1318] A panel of murine orthologs of the human STING variants, discovered in human patients, was designed. These orthologs differ by one codon from the human variants, and were cloned into the pATI-1.75 vector under the control of an EF-1α promoter, to yield the following set of mutants: muSTING N153S, muSTING V154M, muSTINGR280Q, muSTING V146L, muSTINGR283G, and muSTING C205Y, among others. The STING variants were evaluated in the MC38 model of murine adenocarcinoma for anti-tumor efficacy. For the studies, 6-8 week-old female C57BL/6 mice (5 mice per group) were inoculated SC in the right flank with MC38 colorectal adenocarcinoma cells (5×10⁵ cells in 100 μL PBS). Mice bearing established flank tumors were IV injected on day 10 with 5×10⁵ CFUs of strain YS1646Δasd/ΔFLG, containing a plasmid with EF-1α driving the expression of muSTINGN153S, muSTING V154M, muSTING R280Q, muSTING V146L, or muSTING R283G, or a scrambled shRNA plasmid control, and compared to PBS vehicle control.

[1319] In this experiment, strain YS1646Δasd/ΔFLG EF-1α-shSCR (scrambled plasmid control) demonstrated anti-tumor efficacy as compared to PBS control (73% TGI, day 26), which was much more potent than the YS1646 parental strain has shown historically. This can be due to inherently immunostimulatory elements on the plasmid itself, such as CpGs and RNAi stimulatory elements. However, this therapy was the least well tolerated of the group, demonstrating a weight loss nadir of 9.9% that only resolved at the very end of the study. In contrast, the constitutively active murine STING mutants resulted in a lower weight loss that was transient and that resolved within days. The relative anti-tumor efficacy of these variants revealed differences in activity, with only two variants demonstrating curative effects and enhanced efficacy over the plasmid control, muSTING N153S, and muSTING R283G.

| Murine STING | TGI vs. PBS, | Complete | Weight Loss |
|---|---|---|---|
| GOF Mutant | Day 26 | Response | Nadir and Day |
| Plasmid Control | 73.0% | 0/5 | 9.9%, day 19 |
| muSTING N153S | 81.7% | 1/5 | 6.2%, day 12 |
| muSTING VI54M | 69.4% | 0/5 | 4.3%, day 12 |
| muSTING R280Q | 68.7% | 0/5 | 5.4%, day 12 |
| muSTING VI46L | 63.4% | 0/5 | 2.8%, day 12 |
| muSTING R283G | 81.2% | 1/5 | 6.9%, day 12 |

[1320] In a follow-up study, the murine STING C205Y variant was tested along with the R283G and N153S variants, to compare their anti-tumor efficacy. 6-8 week-old female C57BL/6 mice (5 mice per group) were inoculated SC in the right flank with MC38 colorectal adenocarcinoma cells (5×10⁵ cells in 100 μL PBS). Mice bearing established flank tumors were IV injected on day 9 with 5×10⁵ CFUs of strain YS1646Δasd/ΔFLG containing a plasmid with EF-1α driving the expression of muSTING N153S, muSTING R283G, or muSTING C205Y, and compared to PBS vehicle control. As before, the STING variants were well tolerated, and only a transient dip in weight loss was observed that resolved quickly. This is likely due to on-target therapy, as it is also observed with the small molecule STING agonists. The efficacy of the two constitutively active murine STING variants, muSTING N153S and muSTING R283G, was nearly identical to the previous study, although the weight loss was much less, for reasons unclear. The muSTING C205Y variant also was highly effective, although not curative.

| Murine STING | TGI vs. PBS, | Complete | Weight Loss |
|---|---|---|---|
| GOF Mutant | Day 29 | Response | Nadir and Day |
| muSTING C205Y | 79.4% | 0/5 | 2.6%, day 13 |
| muSTING N153S | 79.3% | 1/5 | 2.2%, day 13 |
| muSTING R283G | 85.1% | 1/5 | 1.8%, day 13 |

[1321] The STING-cured mice from these studies were re-challenged at day 40 post-initial tumor implantation on the opposite flank, SC with MC38 colorectal adenocarcinoma cells (5×10⁵ cells in 100 μL PBS). Compared to naïve mice (N=5), in which all tumors grew out, all of the STING-cured mice rejected the tumors, demonstrating the engagement of adaptive immunity.

[1322] These data validate the safety and potency of the murine versions of the human constitutively active STING variants in a murine model of colorectal carcinoma, and reveal a small subset of variants that have enhanced potency compared to the other STING variants. These highly active variants also elicit protective immunity, demonstrating the potency of tumor-specific production of type I interferon.

### Murine STING GOF Variants Demonstrate Significant Tumor Remodeling Following IV Dosing

[1323] It was next determined whether the bacterial strains containing plasmids encoding constitutively active STING variants demonstrate differences in their ability to remodel the tumor microenvironment (TME) following IV dosing. To test this, 6-8 week-old female C57BL/6 mice (5 mice per group) were inoculated SC in the right flank with MC38 colorectal adenocarcinoma cells (5×10⁵ cells in 100 μL PBS). Mice bearing established flank tumors were IV injected on day 8 with 5×10⁵ CFUs of strain YS1646Δasd/ΔFLG, containing a plasmid with EF-1α driving the expression of muSTINGN153S, muSTING V154M, muSTING R280Q, muSTING V146L, muSTING R283G, or plasmid control, and compared to PBS vehicle control.

[1324] At day 28 post tumor implantation, tumors were excised for analysis. Tumors were cut into 2-3 mm pieces into gentleMACS™ C tubes (Miltenyi Biotec) filled with 2.5 mL enzyme mix (RPMI-1640+10% FBS with 1 mg/mL Collagenase IV and 20 μg/mL DNase I). The tumor pieces were dissociated using OctoMACS™ (Miltenyi Biotec) specific dissociation program (mouse implanted tumors), and the whole cell preparation was incubated with agitation for 45 minutes at 37° C. After 45 minutes of incubation, a second round of dissociation was performed using the OctoMACS™ (mouse implanted tumor) program, and the resulting single cell suspensions were filtered through a 70 μM nylon mesh into a 50 mL tube. The nylon mesh was washed once with 5 mL of RPMI-1640+10% FBS, and the cells were filtered a second time using a new 70 μM nylon mesh into a new 50 mL tube. The nylon mesh was washed with 5 mL of RPMI-1640 with 10% FBS, and the filtered cells were then centrifuged at 1000 RPM for 7 minutes. The resulting dissociated cells were resuspended in PBS and kept on ice before the staining process.

[1325] The percentage of live tumor-infiltrating leukocytes (TILs), including CD4⁺ Tregs, CD4⁺ Th1 cells, CD8⁺ T cells, neutrophils, monocytes, dendritic cells (DCs), M1 macrophages and M2 macrophages, following the administration of strain YS1646Δasd/ΔFLG, containing plasmids encoding the various GOF muSTING mutants, was determined by flow cytometry. For the flow-cytometry staining, 100 μL of the single cell suspensions were seeded in wells of a V-bottom 96-well plate. PBS containing a dead/live stain (Zombie Aqua™, BioLegend) and Fc Blocking reagents (BD Biosciences) were added at 100 μL per well, and incubated on ice for 30 minutes in the dark. After 30 minutes, the cells were washed twice with PBS+2% FBS by centrifugation at 1300 RPM for 3 minutes. The cells were then resuspended in PBS+2% FBS, containing fluorochrome-conjugated antibodies (CD4 FITC clone RM4-5; CD8a BV421 clone 53-6.7; F4/80 APC clone BM8; CD11b PE-Cy7 clone M1/70; CD45 BV570 clone 30-F11; CD3 PE clone 145-2C11; Ly6C BV785 clone HK1.4; I-A/I-E APC-Cy7 clone M5/114.15.2; Ly6G BV605 clone 1A8; and CD24 PercP-Cy5.5 clone M1/69; all from BioLegend), and incubated on ice for 30 minutes in the dark. After 30 minutes, the cells were washed twice with PBS+2% FBS by centrifugation at 1300 RPM for 3 minutes and resuspended in flow cytometry fixation buffer (Thermo Fisher Scientific). Flow cytometry data were acquired using the ACEA NovoCyte® flow cytometer (ACEA Biosciences, Inc.), and analyzed using the FlowJo™ software (Tree Star, Inc.).

[1326] As shown in the tables below, the YS1646Δasd/ΔFLG strain with the EF-1α plasmid control demonstrated predominantly high neutrophil infiltration, despite some CD8⁺ T-cell recruitment, likely due to immunostimulatory elements on the plasmid. In contrast, the different muSTING variants had unique tumor-infiltrating immune cell signatures, with some, such as muSTING V146L and muSTING R283G resulting in fewer immunosuppressive neutrophils than the PBS control. The most favorable immune profiles were observed in the tumors from mice that were administered the muSTING R283G and muSTING N153S mutants, with high numbers of CD4⁺ Th1 cells and CD8⁺ T-cells, and low numbers of neutrophils, which indicates highly favorable conditions for generating an adaptive immune response. In addition, the muSTING R283G and muSTING N153S mutants had significantly higher p15e tumor-antigen-specific CD8G T-cells in the tumor, as compared to PBS. These trends were also recapitulated in the total cell counts, as shown below. Thus, delivery of constitutively active STING variants to the tumor-resident myeloid cells leads to a complete remodeling of the immunosuppressive tumor microenvironment, towards an adaptive anti-tumor phenotype, and away from a bacterial phenotype, which is characterized by the promotion of innate immunity and the suppression of adaptive immunity.

### % of Live Tumor-Infiltrating Leukocytes (TILs)

| | muSTING GOF Mutants Encoded on Plasmids in IV- | | | | | | |
|---|---|---|---|---|---|---|---|
| | Administered YS1646Δasd/ΔFLG Strain | | | | | | |
| % Among | | Plasmid | muSTING | muSTING | muSTING | muSTING | muSTING |
| TILs | PBS | Control | N153S | V154M | R280Q | V146L | R283G |
| CD4⁺ Tregs | 2.9 ± 1.7 | 1.8 ± 0.5 | 3.3 ± 2.6 | 1.5 ± 0.5 | 2 ± 0.9 | 1.8 ± 0.5 | 1.5 ± 0.4 |
| CD4⁺ Th1 Cells | 6.6 ± 3.2 | 13 ± 4.3 | 20.7 ± 10.4 | 13.2 ± 6.1 | 22.6 ± 7.4 | 19.5 ± 4.9 | 25.6 ± 7.8 |
| CD8⁺ T Cells | 16.2 ± 10.2 | 24.5 ± 11.6 | 25.8 ± 9.2 | 16.5 ± 4.4 | 20.2 ± 7.2 | 20.8 ± 3.6 | 27.8 ± 8.7 |
| Neutrophils | 11.3 ± 14.2 | 30.6 ± 17.4 | 13.5 ± 12.4 | 21.4 ± 12.5 | 15.9 ± 11.6 | 9.1 ± 6.5 | 6.6 ± 5.9 |
| Monocytes | 16.6 ± 3.5 | 12.7 ± 2.7 | 13.7 ± 3.9 | 16.4 ± 5.4 | 15.8 ± 6.5 | 15.6 ± 2.2 | 13.5 ± 1.3 |
| DCs | 1.4 ± 0.4 | 0.5 ± 0.3 | 0.9 ± 0.7 | 0.4 ± 0.2 | 0.5 ± 0.3 | 0.5 ± 0.2 | 0.5 ± 0.3 |
| M1 Macrophages | 10.2 ± 6.2 | 3.1 ± 2.1 | 4.6 ± 2.1 | 9.4 ± 5 | 5.6 ± 4.2 | 8.6 ± 3.7 | 5.4 ± 2 |
| M2 Macrophages | 14.9 ± 10.6 | 4.6 ± 2.6 | 7.3 ± 3.1 | 11.6 ± 5.2 | 8.6 ± 6.3 | 12.8 ± 5 | 9.2 ± 4 |

### Total Cell Counts

| | muSTING GOF Mutants Encoded on Plasmids in IV- | | | | | | |
|---|---|---|---|---|---|---|---|
| | Administered YS1646Δasd/ΔFLG Strain | | | | | | |
| | | Plasmid | muSTING | muSTING | muSTING | muSTING | muSTING |
| | PBS | Control | N153S | V154M | R280Q | V146L | R283G |
| CD4⁺ Tregs | 437 ± 230 | 148 ± 102 | 530 ± 117 | 310 ± 114 | 520 ± 169 | 297 ± 207 | 438 ± 176 |
| CD4⁺ Th1 Cells | 1108 ± 599 | 1059 ± 711 | 3765 ± 917 | 3349 ± 2869 | 5864 ± 1618 | 2961 ± 1800 | 7463 ± 3240 |
| CD8⁺ T Cells | 2948 ± 3119 | 1571 ± 601 | 6152 ± 3820 | 3898 ± 2823 | 5446 ± 2454 | 3266 ± 1277 | 7566 ± 1782 |
| Neutrophils | 1531 ± 1604 | 2604 ± 1975 | 3699 ± 4400 | 4815 ± 3423 | 4301 ± 3502 | 1240 ± 1160 | 1698 ± 1485 |
| Monocytes | 2871 ± 1472 | 912 ± 369 | 3182 ± 1708 | 3350 ± 1183 | 4132 ± 1595 | 2524 ± 1420 | 3811 ± 996 |
| DCs | 233 ± 97 | 28 ± 18 | 161 ± 45 | 82 ± 31 | 130 ± 90 | 78 ± 48 | 135 ± 90 |
| M1 Macrophages | 2163 ± 2025 | 227 ± 213 | 881 ± 316 | 1797 ± 750 | 1421 ± 910 | 1325 ± 856 | 1524 ± 658 |
| M2 Macrophages | 3046 ± 2996 | 334 ± 275 | 1391 ± 373 | 2183 ± 608 | 2189 ± 1402 | 2043 ± 1237 | 2612 ± 1330 |

### Example 14

### Expression of Multiple Immunomodulatory Proteins using Combinatorial Plasmid Expression Cassettes

### Multi-Modular Plasmid Expression Cassettes Demonstrate the Ability to Produce Multiple Immunomodulatory Proteins in Human Cells

[1329] Combinations of nucleic acids, encoding GOF type I IFN inducing variants and cytokines, were cloned into the pATI-1.75 vector, using two separate ORFs, under the control of the CMV and EF-1α promoters (dual promoter system), or using T2A sequences within the ORFs and one promoter (single promoter system). The constructs also optionally included post-transcriptional regulatory elements (PREs), such as 3′ WPRE or HPRE, and/or polyadenylation signal sequences, such as the SV40 or bovine growth hormone (bGH) polyadenylation signals. The constructs prepared included those encoding the cytokines muIL-2, mu-IL-2 with codon optimization (muIL-2 CO), muIL-21, muIL-12p70, muIL-15Rα-IL-15sc, muIL-18, and muIFN-α2, and combinations thereof, the muSTING variant with the mutation R283G; and/or the murine co-stimulatory molecule 4-1BBL with a deletion of the cytoplasmic domain (mu4-1BBLΔcyt). The sequences were confirmed by PCR.

[1330] To determine whether the combination plasmids, containing GOF type I IFN inducing variants, can induce functional type I IFN in human cells, the plasmids were assessed using HEK293T STING Null Reporter cells (InvivoGen), which do not contain endogenous STING. These cells express secreted embryonic alkaline phosphatase (SEAP), placed under the control of the endogenous IFN-stimulated response element (ISRE) promoter, where the coding sequence of ISRE has been replaced by the SEAP ORF using knock-in technology. Type I interferon activity can be assessed by monitoring type I IFN-stimulated SEAP production in the cell culture supernatants. In addition, supernatants were collected and evaluated for relative cytokine concentrations by ELISA.

[1331] To test the relative production of type I IFN and co-expressed cytokines, 2×10⁵ 293T-Dual™ Null cells (InvivoGen) were plated one day prior on 24-well plates coated with poly-L-lysine, to achieve 80% confluency. On the day of transfection, 500 ng of plasmids encoding a panel of GOF variants, cytokines, and co-stimulatory molecules, alone, or in various combinations, were diluted in serum-free media and added to FuGENE® transfection reagent (Promega), at the proper reagent:DNA ratios. Cell culture supernatants from each sample were collected after overnight incubation, and 20 μL of the cell culture supernatants was added to 180 μL QUANTI-Blue™ reagent (InvivoGen). Type I interferon activation was determined by measuring ISRE-induced SLAP activity on a SpectraMax® M3 Spectrophotometer (Molecular Devices) at an absorbance wavelength of 650 nm. The muIL-2 constructs were evaluated for muIL-2 expression in a murine IL-2 ELISA (R&D Systems), according to the manufacturer's instructions. The muIL-12p70 constructs were evaluated in a murine IL-12 ELISA (R&D Systems), according to the manufacturer's recommendation. For the muIL-15Rα-IL-15sc constructs, the murine IL-15 ELISA (efioscience) was used, per kit instructions. FN-α2 was measured using the RAW-Lucia™ ISG reporter cell line (InvivoGen). Murine IL-18 and murine IL-21 were measured by ELISA (Invitrogen).

[1332] As shown in the table below, assays performed to detect the presence of secreted functional proteins demonstrated high expression of multiple combination payloads. These include cytokine combinations, as well as combinations with type I IFN inducing GOF variants, and/or with co-stimulatory payloads. These data validate the ability of the platform provided herein to express multiple immunomodulatory proteins from a single expression cassette.

| | Protein Expression | | | | | | | |
|---|---|---|---|---|---|---|---|---|
| | STING | IL-2 | IL-12 | | IL-15 | IFN-α2 | IL-21 | |
| | (Abs 650 | (Abs 650 | (Abs 650 | IL-15 | (Abs 650 | (Lumines- | (OD at | IL-18 |
| Construct | nm) | nm) | nm) | (pg/mL) | nm) | cence) | 450 nm) | (pg/mL) |
| CMV-muIL-2 | | 1.995 | | | | | | |
| CMV-muIL-2 | | 2.0073 | | | | | | |
| CO-WPRE | | | | | | | | |
| EF-1α- | | | | | | | 1.138 ± | |
| muIL-21 | | | | | | | 0.1853 | |
| CMV- | | | | | | | 0.4758 ± | |
| muIL-21 | | | | | | | 0.0461 | |
| EF-1a- | | | 0.9052 | | | | | |
| muIL-12p70 | | | | | | | | |
| CMV- | | | | 30140.8 ± | 0.8224 | | | |
| muIL-15Rα- | | | | 535.5 | | | | |
| IL-15sc- | | | | | | | | |
| WPRE | | | | | | | | |
| EF-1α- | | | | | | 14570 | | |
| muIFN-α2 | | | | | | | | |
| CMV- | | | | | | 18658 | | |
| muIFN-α2- | | | | | | | | |
| WPRE | | | | | | | | |
| CMV-muIL-2 | | 2.0998 | | | | 13066 | | |
| CO_T2A_muIFN- | | | | | | | | |
| α2-WPRE | | | | | | | | |
| CMV- | | | | 29895.9 ± | 1.0125 | 8571 | | |
| muIL-15Rα- | | | | 630.9 | | | | |
| sc_T2A_muIFN- | | | | | | | | |
| α2-WPRE | | | | | | | | |
| CMV- | | 2.0589 | | | | 8297 | | |
| muIL-2 CO + | | | | | | | | |
| EF-1α- | | | | | | | | |
| muIFN-α2 | | | | | | | | |
| CMV-muIL-21 + | | | | | | 8682 | 0.3797 ± | |
| EF-1α- | | | | | | | 0.0830 | |
| muIFN-α2 | | | | | | | | |
| CMV- | | 2.0085 | | | | | 0.7565 ± | |
| muIL-2 CO + | | | | | | | 0.1271 | |
| EF-1α- | | | | | | | | |
| muIL-21 | | | | | | | | |
| CMV- | | | | 12605 ± | 0.2362 | | 0.2963 ± | |
| muIL-15Rα- | | | | 278.6 | | | 0.0155 | |
| IL-15sc + | | | | | | | | |
| EF-1α- | | | | | | | | |
| muIL-21 | | | | | | | | |
| CMV- | | | 1.0893 | | | | 0.1479 ± | |
| muIL-12p70 + | | | | | | | 0.001 | |
| EF-1α- | | | | | | | | |
| muIL-21 | | | | | | | | |
| CMV- | | 1.207 ± | | | | | | |
| muIL-2 CO- | | 0.121 | | | | | | |
| HPRE- | | | | | | | | |
| bGHpoly(A) | | | | | | | | |
| EF-1α- | 0.4874 ± | | | | | | | |
| muSTING | 0.0045 | | | | | | | |
| R283G | | | | | | | | |
| CMV- | 0.4866 ± | | | | | | | |
| muSTING | 0.0511 | | | | | | | |
| R283G- | | | | | | | | |
| WPRE | | | | | | | | |
| CMV- | | 0.9971 ± | 0.3303 ± | | | | | |
| muIL-2 CO + | | 0.0104 | 0.0157 | | | | | |
| EF-1α- | | | | | | | | |
| muIL-12p70 | | | | | | | | |
| CMV- | | | 0.3629 ± | | 0.1464 ± | | | |
| muIL-15Rα- | | | 0.0242 | | 0.0034 | | | |
| IL-15sc + | | | | | | | | |
| EF-1α- | | | | | | | | |
| muIL-12p70 | | | | | | | | |
| CMV- | 0.7096 ± | | | | | | | 5991.4 ± |
| muIL-18 + | 0.0169 | | | | | | | 1642.0 |
| EF-1α- | | | | | | | | |
| muSTING | | | | | | | | |
| R283G- | | | | | | | | |
| WPRE | | | | | | | | |
| CMV- | | | 0.6538 ± | | | 577.3 ± | | 12685.0 ± |
| muIL- | | | 0.0205 | | | 122.5 | | 4402.8 |
| 12p70_T2A_muIFN- | | | | | | | | |
| α2 + | | | | | | | | |
| EF-1α-IL-18 | | | | | | | | |
| WPRE | | | | | | | | |
| CMV-muIL- | 0.454 ± | | 0.4581 ± | | | | | 3805.8 ± |
| 12p70_T2A_muSTING | 0.123 | | 0.0158 | | | | | 1369.5 |
| R283G + | | | | | | | | |
| EF-1α- | | | | | | | | |
| muIL-18-WPRE | | | | | | | | |
| CMV- | 0.5867 ± | | | | 0.2326 ± | | | 3626 ± |
| muIL-15Rα- | 0.0333 | | | | 0.0049 | | | 1248 |
| IL-15sc_T2A muSTING | | | | | | | | |
| R283G + EF- | | | | | | | | |
| 1α-muIL-18- | | | | | | | | |
| WPRE | | | | | | | | |
| CMV- | | | | | 0.3512 ± | 1802 ± | | 6872 ± |
| muIL-15Rα- | | | | | 0.0172 | 216.5 | | 1671 |
| IL-15sc | | | | | | | | |
| T2A_muIFN-α2 + | | | | | | | | |
| EF-1α-muIL- | | | | | | | | |
| 18-WPRE | | | | | | | | |
| CMV-4- | 0.2525 ± | | | | | | | |
| 1BBL(Δcyt) + | 0.0144 | | | | | | | |
| EF-1α- | | | | | | | | |
| muSTING | | | | | | | | |
| R283G- WPRE | | | | | | | | |

Constitutively Active Type I IFN Inducing Variants have Unique Cytokine and Chemokine Profiles

[1333] Supernatants harvested from H-EK293T transfection experiments with a panel of human type I IFN inducing GOF variants, tested as described above, were evaluated for downstream signaling differences using a human anti-viral CBA panel (BD Biosciences), according to the manufacturer's protocol. Each transfection was performed in duplicate, and cytokine levels were measured. The average of two measurements was calculated. Fold increase in average cytokine secretion was calculated compared to untransfected wells, in which the average cytokine secretion was set as 1.00.

[1334] As shown in the table below, low levels of human IL-12p70 were produced in the cells. However, several human type I IFN inducing GOF variants induced the production of type I IFN-α2 and/or IFN-β, including the phosphomimetic TRF3 variant (huIRF3 S3961D), as well as several constitutively active STING variants. A number of these GOF variants produced high levels of secreted CXCL10, demonstrating the ability of these expressed variants to recruit T-cells into the tumor microenvironment. The highest levels of CXCL1 expression were observed following the expression of the huSTING variant with the mutation R284G.

[1335] These data validate the use of multiplexed plasmid expression constructs, containing type I FN inducing GOF variants, for induction of functional downstream cytokines and chemokines, such as CXCL10/IP-10. These variants all have unique signatures, and STING GOF variants induced the highest levels of CXCL10 secretion, particularly huSTING R284G (corresponding to muSTINGR283G).

| | Secreted Immunostimulatory | | | |
|---|---|---|---|---|
| | Cytokines and Chemokines | | | |
| | (Fold Relative to Untransfected) | | | |
| Constructs | IL-12p70 | IFN-α2 | IFN-β | CXCL10 |
| Untransfected control | 1.00 | 1.00 | 1.00 | 1.00 |
| EF-1α-mCherry Control | 1.50 | 1.59 | 1.50 | 2.05 |
| EF-1α-huSTING Negative | 1.32 | 2.10 | 1.43 | 2.16 |
| Control | | | | |
| EF-1α-huSTING WT | 1.66 | 1.69 | 1.46 | 2.77 |
| EF-1α-huSTING-V147L | 1.78 | 2.35 | 21.35 | 332.14 |
| EF-1α-huSTING-N154S | 1.52 | 2.23 | 23.37 | 398.99 |
| EF-1α-huSTING-V155M | 2.00 | 2.09 | 6.02 | 121.38 |
| EF-1α-huSTING-C206Y | 1.39 | 2.02 | 16.51 | 218.38 |
| EF-1α-huSTING-R281Q | 1.35 | 1.35 | 8.17 | 301.18 |
| EF-1α-huSTING-R284G | 1.46 | 2.14 | 13.41 | 429.40 |
| EF-1α-huIRF3-WT | 1.50 | 1.49 | 1.50 | 1.11 |
| EF-1α-huIRF3-S396D | 1.93 | 9.37 | 38.06 | 65.89 |
| CMV-muIFN-α2-WPRE | 1.03 | 3.63 | 1.37 | 146.49 |
| CMV-muIL-2 | 1.03 | 1.63 | 1.37 | 86.02 |
| CO_T2A_muIFN-α2- | | | | |
| WPRE | | | | |
| CMV-muIL-15Rα-IL- | 1.03 | 0.80 | 1.37 | 40.85 |
| 15sc_T2A_muIFN-α2- | | | | |
| WPRE | | | | |

### Immune Cell Co-Culture Assays Identify Optimal Combinations of Immunomodulatory Targets

[1336] In order to determine the optimal combinations of cytokines to elicit T-cell recruitment and activation, a panel was tested in a macrophage and T-cell co-culture assay. Golden ticket (STING deficient) murine primary bone marrow-derived macrophages (BMMs) were generated as described above (see, Example 6), using a 24-well plate. Each well was transfected with the appropriate DNA constructs using FuGENE® transfection reagents (Promega). The constructs included those encoding muIL-2 CO, muIL-12p70, muSTING-R283G, muIL-2 CO+muIL-12p70, muIL-15Rα-IL-15sc+muIL-12p70, and muIL-12p70+muSTING-R283 G+muIL-18.

[1337] 24 hours post-transfection, 100 μL of cell culture supernatants were harvested from the wells for a flow cytometry-based cytokine bead array (CBA). In parallel, two spleens from C57BL/6 mice were dissected, and splenic CD4⁺ and CD8⁺ T-cells were isolated following instructions from a mouse T-cell isolation kit (StemCell Technologies). 200,000 isolated T-cells per well were then added to the transfected cells, with or without CD3ε antibody (clone 145-2C11, BioLegend), at a final concentration of 0.5 μg/ml per well. At 24 and 48 hours post-addition of T-cells to the transfected cells, 100 μL of the co-culture supernatants were harvested from the wells for a flow-cytometry based cytokine bead array. Supernatants from transfected bone marrow macrophages (BMMs) and bone marrow macrophage/T-cell co-cultures were analyzed for their cytokine content, using murine anti-viral and murine Th1 specific cytokine bead arrays, respectively.

[1338] As shown in the table below, only the plasmids encoding muSTING-R283G elicited CXCL10 production from the macrophages, while plasmids encoding muIL-12p70, alone or in combination with other proteins, elicited the highest levels of IFNγ from the co-cultured T-cells, which were greater than the background amount resulting from CD3ε stimulation. The combination of muIL-12p70+muIL-18+muSTING-R283G was able to induce both CXCL10 production from macrophages, and IFNγ production from co-cultured T-cells.

[1339] These data demonstrate the feasibility of expressing multiple immunomodulatory payloads from a single plasmid, as well as the synergistic activities of these combinations.

| | CXCL10 | IFNγ |
|---|---|---|
| | Production | Production |
| | by BMMs | By T-Cells |
| Constructs | (pg/mL) | (pg/mL) |
| Untransfected | 3.82 | 3170.28 |
| CMV-muIL-2 CO-WPRE | 5.92 | 7633.19 |
| EF-1α-muIL-12p70 | 12.24 | 11495.65 |
| CMV-muSTING-R283G | 662.03 | 1060.82 |
| CMV-muIL-2 CO + | 4.59 | 8511.19 |
| EF-1α-muIL-12p70 | | |
| CMV-muIL-15Rα-IL-15sc + | 5.82 | 11694.78 |
| EF-1α-muIL-12p70 | | |
| CMV-muIL-12p70_T2A_muSTING- | 324.92 | 9331.51 |
| R283G + EF-1α-muIL-18 | | |

### Combinatorial Immunotherapy Demonstrates Enhanced Anti-Tumor Activity in a Murine Model of Colorectal Adenocarcinoma

[1340] In order to determine whether tumor-specific delivery of a combination of cytokines enhances anti-tumor efficacy, a construct encoding the combination of muIL-12p70, muIL-18, and muSTING-R283G (CMV-muIL-12p70_T2A_muIL-18+EF-1α-muSTING-R283G-WPRE), was assessed in the MC38 murine model of colorectal adenocarcinoma. For this study, 6-8 week-old female C57BL/6 mice (5 mice per group) were inoculated SC in the right flank with MC38 colorectal adenocarcinoma cells (5×10⁵ cells in 100 μL PBS). Mice bearing established flank tumors were IV injected on day 10 with 1×10⁷ CFUs of strain YS1646Δasd/ΔFLG/ΔpagP/ΔansB, containing a plasmid encoding the combination of muIL-12p70, muIL-18, and muSTING-R283G (CMV-muIL-12p70_T2A_muIL-18+EF-1α-muSTING-R283G-WPRE), or with PBS vehicle control.

[1341] The combination therapy was very well tolerated, with only an initial weight loss of 3.6% that had fully recovered 3 days later. This is in marked contrast to the toxicities observed with systemic administration of these cytokines (IL-12p70 and IL-18). Compared to PBS control, the combination therapy was highly effective and curative (92.3% TGI, 60% cure rate, day 30). These data demonstrate the potency and safety of delivering combinations of cytokines in a tumor-specific manner, using the immunostimulatory bacterial strains described herein.

### Example 15

### Protein Engineering Screening to Identify Improved Gain-of-Function Mutations in STING, RIG-I, MDA5, IRF3, IRF7, and other Interferon Pathway Genes

[1342] Gain-of-function (GOF) amino acid mutants that are constitutively active and that promote interferonopathies are identified from humans. Many GOF mutations occur due to single base pair nucleotide changes that alter the amino acid codon at that particular position in the gene. For example, in STING, the V147L mutation occurs due to a mutation at c.439G→C; N154S occurs due to a mutation at c.461A→G; and V155M occurs due to a mutation at c.463G→A. The purpose of the screening was to identify constitutively active mutants that lead to high levels of type I interferon expression. Designed mutations, at sites known to promote interferonopathies when mutated in human patients, allow for a greater number of amino acid substitutions to be tested. In this example, site-directed mutagenesis with designed amino acids is performed at the positions of known mutations (see, Table below, listing mutations in genes that promote interferonopathies), to identify mutations with enhanced activity, that lead to high level type I interferon expression.

| Exemplary Normal Function Proteins | |
|---|---|
| in which the Mutations are Introduced | Gain-of-Function Mutations |
| STING/TMEM173 | S102P |
| (SEQ ID NOs: 305-309) | V147L |
| | V147M |
| | N154S |
| | V155M |
| | G166E |
| | C206Y |
| | G207E |
| | S102P/F279L |
| | F279L |
| | R281Q |
| | R284G |
| | R284S |
| | R284M |
| | R284K |
| | R284T |
| | R197A |
| | D205A |
| | R310A |
| | R293A |
| | T294A |
| | E296A |
| | R197A/D205A |
| | S272A/Q273A |
| | R310A/E316A |
| | E316A |
| | E316N |
| | E316Q |
| | S272A |
| | R375A |
| | R293A/T294A/E296A |
| | D231A |
| | R232A |
| | K236A |
| | Q273A |
| | S358A/E360A/S366A |
| | D231A/R232A/K236A/R238A |
| | S358A |
| | E360A |
| | S366A |
| | R238A |
| | S324A/S326A |
| | T331I |
| | T331R |
| | A489T |
| | R822Q |
| | G821S |
| MDA5/IFIH1 | A946T |
| (SEQ ID NO: 310) | R337G |
| | D393V |
| | G495R |
| | R720Q |
| | R779H |
| | R779C |
| | L372F |
| | A452T |
| RIG-I | E373A |
| (SEQ ID NO: 311) | C268F |

Amino acid residues R197, D205, R310, R293, T294, E296, S272, Q273, E316, D231, R232, K236, S358, E360, S366, and R238, with reference to the sequence of human STING, as set forth in SEQ ID NOs:305-309, correspond to amino acid residues R196, D204, R309, R292, T293, E295, S271, Q272, E315, D230, R231, K235, S357, E359, S365, and R237, respectively, with reference to the sequence of murine STING, as set forth in SEQ ID NO:369.

[1343] PCR primers are generated with designed substitutions flanked on the 5′ and 3′ ends with homologous cDNA sequences from the gene. The QuikChange® Site-Directed Mutagenesis kit (Agilent), or another comparable commercially available kit, is used to generate a PCR product incorporating the designed mutation. PCR amplified plasmids are treated with DpnI, then electroporated into competent E. coli cells. Individual clones are isolated, plasmid mini-preps are performed, and the sequence identity of the desired mutation is confirmed. Larger scale plasmid preparations are then performed (using a Qiagen Kit), and the DNA is transfected into HEK293T STING Reporter cells (InvivoGen), which do not contain endogenous STING. These cells express Lucia™ luciferase, a secreted luciferase, placed under the control of the endogenous IFN-β promoter; the coding sequence of IFN-β has been replaced by the Lucia™ luciferase ORF using knock-in technology. Constitutively activate mutants then are identified and ranked by measurement of IFN-3 promoter induced expression of luciferase activity.

### Example 16

### Various Species of Immunostimulatory Bacteria with Inactivating Deletions Corresponding to the Deletions in Salmonella typhimurium

[1344] The Examples above describe exemplary modifications to the genome of Salmonella typhimurium to increase targeting to and accumulation of Salmonella typhimurium in immune-resident myeloid cells and in the tumor microenvironment, to deliver therapeutic products/payloads to tumors, and to reduce toxicity of the bacteria by eliminating their ability to infect other cell types. These genetic modifications similarly can be introduced into other bacterial strains and species, such as by deletion of the corresponding genes in other species, as described below.

Escherichia coli

[1345] In-frame chromosomal deletions of the lpxM, purM, asd, fliC, fliE, pagP, ansB and csgD genes are made sequentially in E. coli strains using a technique based on the recombineering methods described by Datsenko and Wanner (Proc. Natl. Acad. Sci. U.S.A. 97:6640-6645 (2000)). The genes in E. coli are as follows:

[1346] 1) lpxM, encoding myristoyl-acyl carrier protein-dependent acyltransferase [E. coli strain K-12, substrain MG1655; NCBI Gene ID: 945143];

[1347] 2) purM, encoding phosphoribosylformylglycinamide cyclo-ligase [E. coli strain K-12, substrain MG1655; NCBI Gene ID: 946975];

[1348] 3) asd, encoding aspartate-semialdehyde dehydrogenase [E. coli strain K-12, substrain MG1655; NCBI Gene ID: 947939];

[1349] 4) fliC, encoding flagellar filament structural protein [E. coli strain K-12, substrain MG1655; NCBI Gene ID: 949101];

[1350] 5) fliE, encoding flagellar basal-body protein FliE [E. coli strain K-12, substrain MG1655; NCBI Gene ID: 946446];

[1351] 6) pagP, encoding Lipid IVA palmitoyltransferase [E. coli strain K-12, substrain MG1655; NCBI Gene ID: 946360];

[1352] 7) ansB, encoding L-asparaginase 2 [E. coli strain K-12, substrain MG1655; NCBI Gene ID: 947454];

[1353] 8) csgD, encoding DNA-binding transcriptional dual regulator CsgD [E. coli strain K-12, substrain MG1655; NCBI Gene ID: 949119]; and

[1354] 9) rpsM, encoding 30S ribosomal subunit protein S13 (promoter) [E. coli strain K-12, substrain MG1655; NCBI Gene ID: 947791].

[1355] Briefly, a specific chromosomal sequence is replaced with a selectable antibiotic resistance marker flanked by homology arms, and is subsequently removed by a cre/loxP system. The 5′ and 3′ flanking sequences of each target gene are identified and cloned into a plasmid vector on opposing sides of an antibiotic resistance gene. The gene deletion cassette, containing the antibiotic resistance gene and flanking 5′ and 3′ homology arms is PCR amplified, gel purified, and introduced into the E. coli strain by electroporation. Electroporated cells are recovered, and transformants are selected for on antibiotic plates. The antibiotic marker is then cured using a cre/loxP recombination system, in which antibiotic resistant clones are transformed with a cre-expressing temperature-dependent plasmid. Colonies are selected at 30° C. and subsequently eliminated by serial passage at 42° C., and then screened for loss of antibiotic resistance. Antibiotic sensitive clones are confirmed for gene deletion by colony PCR and sequence analysis.

Increasing Resistance or Rendering E. coli Resistant to Human Complement

[1356] Expression of the Salmonella typhimurium rck (resistance to complement killing) gene, the Yersinia enterocolitica homolog ail (attachment invasion locus), or the Salmonella typhimurium pgtE (outer membrane serine protease) gene, in the E. coli ΔlpxM/ΔpurM/Δasd/ΔfliC/ΔfliE/ΔpagP/ΔansB/ΔcsgD strain is achieved by encoding the rck, ail, or pgtE gene sequence downstream from a constitutive promoter, such as E. coli or S. typhimurium rpsM, on a plasmid (asd complementation system compatible), or by insertion on the bacterial chromosome (at any of the lpxM, purM, asd, fliC, fliE, pagP, ansB, or csgD loci).

Salmonella typhi

[1357] In-frame chromosomal deletions of the msbB, purM, asd, fliC, flgB, pagP, ansB, and csgD genes are made sequentially in S. typhi strains using the technique described above for E. coli-based strains.

[1358] Expression of the Salmonella typhimurium rck (resistance to complement killing) gene, the Yersinia enterocolitica homolog ail, or the Salmonella typhimurium pgtE gene, in the S. typhi ΔmsbB/ΔpurM/Δasd/ΔfliC/ΔflgB/ΔpagP/ΔansB/ΔcsgD strain is achieved by encoding the rck, ail, or pgtE gene sequence downstream of a constitutive promoter, such as S. typhimurium or S. typhi rpsM, on a plasmid (asd complementation system compatible), or by insertion on the bacterial chromosome (at any of the msbB, purM, asd, fliC, flgB, pagP, ansB, or csgD loci). The genes in S. typhi are as follows:

[1359] 1) msbB (STY2097), encoding lipid A acyltransferase [Salmonella enterica subspecies enterica serovar Typhi, strain CT18; NCBI Gene ID: 1248440];

[1360] 2) purM (STY2740), encoding phosphoribosylformylglycinamidine cyclo-ligase [Salmonella enterica subspecies enterica serovar Typhi, strain CT18; NCBI Gene ID: 1249054];

[1361] 3) asd (STY4271), encoding aspartate-semialdehyde dehydrogenase [Salmonella enterica subspecies enterica serovar Typhi, strain CT18; NCBI Gene ID: 1250488];

[1362] 4) fliC (STY2167), encoding flagellin [Salmonella enterica subspecies enterica serovar Typhi, strain CT18; NCBI Gene ID: 1248507];

[1363] 5) flgB (STY1213), encoding flagellar basal-body rod protein FlgB [Salmonella enterica subspecies enterica serovar Typhi, strain CT18; NCBI Gene ID: 1247617];

[1364] 6) pagP (STY0677), encoding antimicrobial peptide resistance and lipid A acylation protein [Salmonella enterica subspecies enterica serovar Typhi, strain CT 18; NCBI Gene ID: 1247137];

[1365] 7) ansB (STY3259), encoding L-asparaginase [Salmonella enterica subspecies enterica serovar Typhi, strain CT18; NCBI Gene ID: 1249541];

[1366] 8) csgD (STY1179), encoding regulatory protein CsgD [Salmonella enterica subspecies enterica serovar Typhi, strain CT18; NCBI Gene ID: 1247585]; and 9) rpsM (STY4380), encoding 30S ribosomal subunit protein S13 (promoter) [Salmonella enterica subspecies enterica serovar Typhi, strain CT18; NCBI Gene ID: 1250594].

Listeria monocytogenes

[1367] In-frame chromosomal deletions of the purA, purQ, purS, asd, flaA, fliC, flgB, and ansB genes in Listeria monocytogenes is achieved by an allelic exchange technique using a temperature-sensitive shuttle vector, such as pKSV7, that confers antibiotic resistance and allows replication at low temperatures (30° C.), but is unable to replicate at higher temperature (43° C.). The 5′ and 3′ flanking sequences of each target gene are identified and cloned in tandem into the pKSV7 vector, which is transformed into recipient Listeria monocytogenes and selected for by plating on agar plates with antibiotic. Chromosomal integration of the plasmid is induced by serial passage of antibiotic-resistant transformants at 42° C. under selection. Subsequent sequential subculturing of the strain at 30° C. results in subpopulations of cells in which the plasmids are excised through a second crossover event, producing reversions to the original wild-type gene, or incorporation of the 5′ and 3′ flanking sequence homology arms to generate the targeted deletion mutant. Antibiotic sensitive clones are screened at this step by colony PCR and sequence analysis.

[1368] To increase complement resistance, expression of the Salmonella typhimurium rck (resistance to complement killing) gene, the Yersinia enterocolitica homolog ail, or the Salmonella typhimurium pgtE gene in the Listeria monocytogenes ΔpurA/ΔpurQ/ΔpurS/Δasd/ΔflaA/ΔfliC/ΔflgB/ΔansB strain is achieved by encoding the rck, ail, or pgtE gene sequence downstream of a constitutive promoter, such as P_{hyper} or Pₕₑₗₚₑᵣ, on a plasmid (asd complementation system compatible), or by insertion on the bacterial chromosome (at any of the purA, purQ, purS, asd, flaA, fliC, flgB, or ansB loci). The genes in L. monocytogenes are as follows:

[1369] 1) purA (lmo0055), encoding adenylosuccinate synthetase [Listeria monocytogenes strain EGD-e; NCBI Gene ID: 986069];

[1370] 2) purQ (lmol769), encoding phosphoribosylformylglycinamidine synthase II [Listeria monocytogenes strain EGD-e; NCBI Gene ID: 985972];

[1371] 3) purS (lmo1771), encoding phosphoribosylformylglycinamidine synthase subunit PurS [Listeria monocytogenes strain EGD-e; NCBI Gene ID: 985970];

[1372] 4) asd (lmo1437), encoding aspartate-semialdehyde dehydrogenase [Listeria monocytogenes strain EGD-e; NCBI Gene ID: 986492];

[1373] 5) flaA (lmo0690), encoding flagellin [Listeria monocytogenes strain EGD-e; NCBI Gene ID: 987167];

[1374] 6) fliE (lmo0712), encoding flagellar hook-basal body protein FliE [Listeria monocytogenes strain EGD-e; NCBI Gene ID: 985062];

[1375] 7) flgB (lmo0710), encoding flagellar basal-body rod protein FlgB [Listeria monocytogenes strain EGD-e; NCBI Gene ID 985059]; and

[1376] 8) ansB (lmo1663), encoding asparagine synthetase [Listeria monocytogenes strain EGD-e; NCBI Gene ID: 985663].

[1377] The genes msbB and pagP are absent in Listeria monocytogenes, which is a Gram-positive bacterium. CsgD also is absent in Listeria monocytogenes. Instead, Listeria express lcp, encoding the Listeria cellulose binding protein that is involved in biofilm formation, which also can be deleted.

Bifidobacterium longum

[1378] In-frame chromosomal deletions of BL1122 (purM), BL0492 (asd) and BL1142 (encoding an L-asparaginase precursor) in Bifidobacterium longum is achieved by an allelic exchange technique using an incompatible plasmid vector system, in which a conditional-replication vector, such as pBS423-ΔrepA, which lacks the plasmid replication gene, repA, is initially integrated into the genome, providing antibiotic resistance. A second plasmid, such as pTBR101-CM, encoding the repA gene, is subsequently transformed and facilitates a second crossover event that selects for excision of the initial integrant. The 5′ and 3′ flanking sequences of each target gene are identified and cloned in tandem into the conditional replication vector, lacking repA, and transformed into the Bifidobacterium longum ΔBL1122/ΔBL0492/ΔBL1142 strain. Crossover recombination events can occur at homology arm sequences, and successful plasmid integrants are selected for and isolated on antibiotic plates. Integrants are then transformed with an incompatible plasmid encoding a functional copy of repA, which facilitates a second crossover event and excision of the repA deficient plasmid, which is subsequently lost due to plasmid incompatibility. Genomic deletions are confirmed by colony PCR and sequence analysis, and the remaining plasmid is cured by removing selection and subsequent Rif treatment.

[1379] Expression of the Salmonella typhimurium rck (resistance to complement killing) gene, the Yersinia enterocolitica homolog ail, or the Salmonella typhimurium pgtE gene in the Bifidobacterium longum ΔBL1122/ΔBL0492/ΔBL1142 strain is achieved by encoding the rck, ail, or pgtE gene sequence downstream of a strong constitutive promoter, such as P_{gap}, on a plasmid (asd complementation system compatible), or by insertion on the bacterial chromosome (at any of the BL1122, BL0492, or BL1142 loci). The Bifidobacterium longum genes are as follows:

[1380] 1) purM (BL1122), encoding phosphoribosylformylglycinamidine cyclo-ligase [Bifidobacterium longum strain NCC2705; NCBI Gene ID: 1022669];

[1381] 2) asd (BL0492), encoding aspartate-semialdehyde dehydrogenase [Bifidobacterium longum strain NCC2705; NCBI Gene ID: 1023089];

[1382] 3) BL 1142, encoding an L-asparaginase precursor (Ntn_Asparaginase_2_like; L-Asparaginase type 2-like enzymes of the NTN-hydrolase superfamily) [Bifidobacterium longum strain NCC2705; NCBI Gene ID: 1023120]; and

[1383] 4) BL1363 gap (promoter) [Bifidobacterium longum strain NCC2705; NCBI Gene ID: 1022828].

[1384] Bifidobacterium longum are non-motile and lack flagellin, and are Gram-positive and lack msbB and pagP. The ansB gene is present, but encodes aspartate ammonia-lyase, which catalyzes the formation of fumarate from aspartate (aspA/ansB) [BL0338, Bifidobacterium longum strain NCC2705; NCBI Gene ID: 1023259].

Clostridium novyi

[1385] In-frame chromosomal deletions of NT01CX_RS09765, NT01CX_RS07625, and NT01CX_RS04325 (asd); the flagellin genes NT01CX_RS04995, NT01CX_RS04990, NT01CX_RS05070, and NT01CX_RS05075; and the flagellar basal body rod protein genes NT01CX_RS05080 (flgB), NT01CX_RS05085 (flgC), and NT01CX_RS05215 (flgG) in Clostridium is achieved by an allelic exchange technique requiring a counter-selection method including toxin-antitoxin systems, which requires an inducible promoter and toxic gene, such as the E. coli mRNA interferase mazF. The 5′ and 3′ flanking sequences of each target gene are identified and cloned in a configuration on opposing sides of a frt-flanked antibiotic resistance cassette in an allelic exchange counter-selection-containing vector, and transformed into Clostridium novyi. The mazF gene is encoded under the control of an inducible lac promoter on the allelic exchange vector, and permits selection of a double crossover event by growth on lactose-supplemented agar plates. Genomic deletions are confirmed by colony PCR and sequence analysis. Flp-frt recombination can then be used to cure the antibiotic resistance cassette from the chromosome.

[1386] Expression of the Salmonella typhimurium rck (resistance to complement killing) gene, the Yersinia enterocolitica homolog ail, or the Salmonella typhimurium pgtE gene in the Clostridium novyi ANT01CX_RS09765/A NT01CX_RS07625/ΔNT01CX_RS04325/ΔNT01CX_RS04995/ΔNT01CX_RS04990/ΔNT01CX_RS05070/ΔNT01CX_RS05075/ΔNT01CX_RS05080/ΔNT01CX_RS050 85/ΔNT01CX_RS05215 strain is achieved by encoding the rck, ail, or pgtE gene sequence downstream from a strong constitutive promoter, such as Pₜₕₗ, P_{ptb}, or other variants, on a plasmid (asd complementation system compatible), or by insertion on the bacterial chromosome (at any of the NT01CX_RS09765, NT01CX_RS07625, NT01CX_RS04325, NT01CX_RS04995, NT01CX_RS04990, NT01CX_RS05070, NT01CX_RS05075, NT01CX_RS05080, NT01CX_RS05085, or NT01CX_RS05215 loci). The Clostridium novyi genes are as follows:

[1387] 1) NT01CX_RS09765, encoding AIR synthase [Clostridium novyi strain NT; NCBI Gene ID: 4541583];

[1388] 2) NT01CX_RS07625, encoding phosphoribosylformylglycinamidine cyclo-ligase [Clostridium novyi strain NT; NCBI Gene ID: 4540669];

[1389] 3) NT01CX_RS04325 (asd), encoding aspartate-semialdehyde dehydrogenase [Clostridium novyi strain NT; NCBI Gene ID: 4541762];

[1390] 4) NT01CX_RS04995, encoding flagellin [Clostridium novyi strain NT; NCBI Gene ID: 4541703];

[1391] 5) NT01CX_RS04990, encoding flagellin [Clostridium novyi strain NT; NCBI Gene ID: 4539984];

[1392] 6) NT01CX_RS05070, encoding flagellin [Clostridium novyi NT; NCBI Gene ID: 4539886];

[1393] 7) NT01CX_RS05075, encoding flagellin [Clostridium novyi NT; NCBI Gene ID: 4539699];

[1394] 8) NT01CX_RS05080 (flgB), encoding flagellar basal body rod protein FlgB [Clostridium novyi strain NT; NCBI Gene ID: 4540637];

[1395] 9) NT01CX_RS05085 (flgC), encoding flagellar basal body rod protein FlgC [Clostridium novyi strain NT; NCBI Gene ID: 4540143]; and

[1396] 10) NT01CX_RS05215 (flgG), encoding flagellar basal body rod protein FlgG [Clostridium novyi strain NT; NCBI Gene ID: 4540245].

[1397] Clostridium novyi is Gram-positive, and lacks msbB and pagP.

### Example 17

### Immunostimulatory Bacteria Modified to Express Vertebrate STING Variants that Induce Stronger Type I IFN Signaling and/or Weaker NF-κB Signaling than Human STING

[1398] STING signaling activates two signaling pathways. The first is the TANK binding kinase 1 (TBK1)/IRF3 axis, resulting in the induction of type I IFNs, and the activation of dendritic cells (DCs) and cross-presentation of tumor antigens to activate CD8⁺ T-cell mediated anti-tumor immunity. The second is the nuclear factor kappa-light-chain-enhancer of activated B-cell (NF-κB) signaling axis, resulting in a pro-inflammatory response, but not in the activation of the DCs and CD8⁺ T-cells that are required for anti-tumor immunity. Bacterially-based cancer immunotherapies are limited in their ability to induce type I IFN to recruit and activate the CD8⁺ T-cells that are necessary to promote tumor antigen cross-presentation and durable anti-tumor immunity. Hence, provided are immunostimulatory bacteria herein that induce and/or increase type I IFN signaling, and that have decreased NF-κB signaling, thereby increasing the induction of CD8⁺ T-cell mediated anti-tumor immunity, and enhancing the therapeutic efficacy of the bacteria. The immunostimulatory bacteria described above encode modified STING proteins that are gain-of-function mutants of STING that can increase induction of type I IFN compared to wild-type STING, or render the expression of type I IFN constitutive. In this example (and also described in the detailed description), the STING protein is modified to reduce or eliminate NF-κB signaling activity, and to retain the ability to induce type I IFN, and/or is modified for increased or constitutive type I IFN expression. This results in immunostimulatory bacteria that induce anti-tumor immunity, and do not induce (or induce less) NF-κB signaling that normally results from infection by bacterial pathogens.

[1399] STING proteins from different species exhibit different levels of type I IFN and NF-κB signaling activities. For example, STING signaling in human and mouse cells results in a strong type I IFN response, and a weak pro-inflammatory NF-κB response. STING signaling in ray-finned fish, such as salmon and zebrafish, in comparison, elicits robust activation of a primarily NF-κB-driven response, that is more than 100-fold higher compared with the IRF3-driven (i.e., type I IFN inducing) response. In other species, such as Tasmanian devil, STING signaling results in a type I IFN response, but essentially no NF-κB response. The immunostimulatory bacteria provided herein encode STING from non-human species, such as Tasmanian devil STING, in order to exploit the ability of STING to induce a type I IFN response, but without the concomitant induction of an NF-κB response. As described herein, these non-human STING proteins also are modified by mutation to increase the type I IFN response, or to render it constitutive. The identified mutations that have this effect in human STING are introduced into the non-human STING proteins. The corresponding residues are identified by alignment.

[1400] Also provided are chimeras in which the C-terminal tail (CTT) of STING is replaced in one species, such as human, with the CTT from a second (e.g., non-human) species STING protein that exhibits little or no NF-κB signaling activity. The CTT is an unstructured stretch of approximately 40 amino acids that contains sequence motifs required for STING phosphorylation and recruitment of IRF3. It can shape downstream immunity by altering the balance between type I IFN and NF-κB signaling. This is controlled through independent modules in the CTT, including IRF3-, TBK1-, and TRAF6-binding modules. For example, human STING residue S366 (see, e.g., SEQ ID NOs:305-309) is a primary TBK1 phosphorylation site that is part of an LxIS motif in the CTT, which is required for IRF3 binding, while a second PxPLR motif, including residue L374, is required for TBK1 binding. The LxIS and PxPLR motifs are highly conserved in all vertebrate STING alleles. Replacing the CTT of human STING with that of, for example, Tasmanian devil STING, produces a STING variant that induces a type I IFN response, but not an NF-κB response.

[1401] In this Example, the immunostimulatory bacteria are engineered to express a STING variant with increased type I IFN signaling, and/or reduced NF-κB signaling, compared to wild-type (WT) human STING (see, e.g., SEQ ID NOs:305-309). The STING variants can be from a non-human vertebrate, such as a mammalian, bird, reptilian, amphibian, or fish species. Species from which the non-human STING proteins are derived include, but are not limited to, Tasmanian devil (Sarcophilus harrisii; SEQ ID NO:349), marmoset (Callithrix jacchus; SEQ ID NO:359), cattle (Bos taurus; SEQ ID NO:360), cat (Felis catus; SEQ ID NO:356), ostrich (Struthio camelus australis; SEQ ID NO:361), crested ibis (Nipponia nippon; SEQ ID NO:362), coelacanth (Latimeria chalumnae; SEQ ID NOs:363-364), boar (Sus scrofa; SEQ ID NO:365), bat (Rousettus aegyptiacus; SEQ ID NO:366), manatee (Trichechus manatus latirostris; SEQ ID NO:367), ghost shark (Callorhinchus milii; SEQ ID NO:368), and mouse (Mus musculus; SEQ ID NO:369). These vertebrate STING proteins readily activate immune signaling in human cells, indicating that the molecular mechanism of STING signaling is shared in vertebrates (see, e.g., de Oliveira Mann et al. (2019) Cell Reports 27:1165-1175). STING proteins from these species induce less NF-κB signal activation and/or more type I IFN signal activation, than human STING (see, e.g., de Oliveira Mann et al. (2019), FIG. 1A). Wild-type or modified STING proteins from different non-human species can be expressed by the immunostimulatory bacteria herein, as can chimeras of human and non-human STING proteins.

[1402] The various non-human STING proteins are modified, such that the non-human STING has lower NF-κB activation, and, optionally, higher type I interferon activation, than human STING. These non-human STING proteins are modified to include a mutation or mutations so that they have increased type I IFN activity, or act constitutively, in the absence of cytosolic nucleic acid ligands (e.g., CDNs). The mutations typically are amino acid mutations, such as gain-of-function mutations, that are associated with interferonopathies in humans. The corresponding mutations are introduced into the non-human species STING proteins, where corresponding amino acid residues are identified by alignment. For example, mutations include, but are not limited to, S102P, V147L, V147M, N154S, V155M, G166E, C206Y, G207E, S102P/F279L, F279L, R281Q, R284G, R284S, R284M, R284K, R284T, R197A, D205A, R310A, R293A, T294A, E296A, R197A/D205A, S272A/Q273A, R310A/E316A, E316A, E316N, E316Q, S272A, R293A/T294A/E296A, D231A, R232A, K236A, Q273A, S358A/E360A/S366A, D231A/R232A/K236A/R238A, S358A, E360A, S366A, R238A, R375A, and S324A/S326A, with reference to the sequence of human STING, as set forth in SEQ ID NOs:305-309. Corresponding mutations in STING from other species are listed in the tables below. The resulting variants of the non-human STING proteins include one or more of these mutations, and optionally, a CTT replacement, and optionally, a deletion in the TRAF6 binding site.

[1403] The STING variants include one or more replacements of the amino acid serine (S) or threonine (T) at a phosphorylation site, with aspartic acid (D), which is phosphomimetic, resulting in increased or constitutive activity. Other mutations include deletion or replacement of a phosphorylation site or sites, such as 324-326 SLS→ALA in STING, and other replacements to eliminate a phosphorylation site to reduce NF-κB signaling in STING. Additionally, chimeras of human STING with STING from other species are provided, in which the C-terminal tail (CTT) of human STING is replaced with the CTT of STING from another species that has lower NF-κB signaling activity, and/or higher type I IFN signaling activity. The variant STING proteins can include a deletion in the TRAF6 binding site of the CTT, to reduce NF-κB signaling.

| Human | Tasmanian | | | | | Crested | |
|---|---|---|---|---|---|---|---|
| STING | devil | Marmoset | Cattle | Cat | Ostrich | ibis | Coelacanth |
| (SEQ ID | STING | STING | STING | STING | STING | STING | STING |
| NOs: | (SEQ ID | (SEQ ID | (SEQ ID | (SEQ ID | (SEQ ID | (SEQ ID | (SEQ ID |
| 305-309) | NO: 349) | NO: 359) | NO: 360) | NO: 356) | NO: 361) | NO: 362) | NO: 363) |
| S102P | S102P | S102P | S102P | S102P | C107P | V106P | A102P |
| V147L | V147L | V145L | I147L | V146L | M152L | M151L | I147L |
| V147M | V147M | V145M | I147M | V146M | — | — | I147M |
| N154S | N154S | N152S | N154S | N153S | N159S | N158S | G154S |
| V155M | V155M | V153M | V155M | V154M | V160M | V159M | V155M |
| G166E | G166E | G164E | G166E | G165E | G171E | G170E | G166E |
| C206Y | C206Y | C204Y | C206Y | C205Y | C211Y | C210Y | C206Y |
| G207E | S207E | G205E | G207E | G206E | N212E | D211E | S207E |
| S102P/ | S102P/ | S102P/ | S102P/ | S102P/ | C107P/ | V106P/ | A102P/ |
| F279L | F279L | F277L | F279L | F278L | F283L | F283L | F279L |
| F279L | F279L | F277L | F279L | F278L | F283L | F283L | F279L |
| R281Q | R281Q | R279Q | R281Q | R280Q | R285Q | R285Q | K281Q |
| R284G | R284G | R282G | R284G | R283G | R288G | R288G | R284G |
| R284S | R284S | R282S | R284S | R283S | R288S | R288S | R284S |
| R284M | R284M | R282M | R284M | R283M | R288M | R288M | R284M |
| R284K | R284K | R282K | R284K | R283K | R288K | R288K | R284K |
| R284T | R284T | R282T | R284T | R283T | R288T | R288T | R284T |
| R197A | R197A | R195A | R197A | R196A | K202A | K201A | R197A |
| D205A | D205A | D203A | D205A | D204A | S210A | S209A | S205A |
| R310A | R310A | R308A | R310A | R309A | R314A | R314A | R310A |
| R293A | R293A | R291A | R293A | R292A | R297A | R297A | R293A |
| T294A | T294A | T292A | T294A | I293A | T298A | T298A | T294A |
| E296A | E296A | E294A | E296A | E295A | E300A | E300A | K296A |
| R197A/ | R197A/ | R195A/ | R197A/ | R196A/ | K202A/ | K201A/ | R197A/ |
| D205A | D205A | D203A | D205A | D204A | S210A | S209A | S205A |
| S272A/ | S272A/ | S270A/ | S272A/ | S271A/ | S276A/ | S276A/ | S272A/ |
| Q273A | Q273A | Q271A | Q273A | Q272A | Q277A | Q277A | K273A |
| R310A/ | R310A/ | R308A/ | R310A/ | R309A/ | R314A/ | R314A/ | R310A/ |
| E316A | E316A | E314A | E316A | E315A | E320A | E320A | E318A |
| E316A | E316A | E314A | E316A | E315A | E320A | E320A | E318A |
| E316N | E316N | E314N | E316N | E315N | E320N | E320N | E318N |
| E316Q | E316Q | E314Q | E316Q | E315Q | E320Q | E320Q | E318Q |
| S272A | S272A | S270A | S272A | S271A | S276A | S276A | S272A |
| R375A | R377A | R373A | R374A | R373A | R371A | R379A | K376A |
| R293A/ | R293A/ | R291A/ | R293A/ | R292A/ | R297A/ | R297A/ | R293A/ |
| T294A/ | T294A/ | T292A/ | T294A/ | I293A/ | T298A/ | T298A/ | T294A/ |
| E296A | E296A | E294A | E296A | E295A | E300A | E300A | K296A |
| D231A | D231A | D229A | D231A | D230A | T236A | T235A | N231A |
| R232A | R232A | R230A | R232A | R231A | R237A | R236A | R232A |
| K236A | K236A | K234A | K236A | K235A | K241A | K240A | K236A |
| Q273A | Q273A | Q271A | Q273A | Q272A | Q277A | Q277A | K273A |
| S358A/ | S360A/ | S356A/ | S357A/ | S356A/ | S354A/ | S362A/ | S359A/ |
| E360A/ | E362A/ | E358A/ | E359A/ | E358A/ | D356A/ | E364A/ | E361A/ |
| S366A | S368A | S364A | S365A | S364A | S362A | S370A | S367A |
| D231A/ | D231A/ | D229A/ | D231A/ | D230A/ | T236A/ | T235A/ | N231A/ |
| R232A/ | R232A/ | R230A/ | R232A/ | R231A/ | R237A/ | R236A/ | R232A/ |
| K236A/ | K236A/ | K234A/ | K236A/ | K235A/ | K241A/ | K240A/ | K236A/ |
| R238A | R238A | R236A | R238A | R237A | R243A | R242A | R238A |
| S358A | S360A | S356A | S357A | S356A | S354A | S362A | S359A |
| E360A | E362A | E358A | E359A | E358A | D356A | E364A | E361A |
| S366A | S368A | S364A | S365A | S364A | S362A | S370A | S367A |
| R238A | R238A | R236A | R238A | R237A | R243A | R242A | R238A |
| S324A/ | S326A/ | L322A/ | S324A/ | S323A/ | F328A/ | S328A/ | S327A |
| S326A | S328A | S324A | S326A | S325A | S330A | S330A | |

| Human | | | | Ghost | |
|---|---|---|---|---|---|
| STING | Boar | Bat | Manatee | Shark | Mouse |
| (SEQ ID | STING | STING | STING | STING | STING |
| NOs: | (SEQ ID | (SEQ ID | (SEQ ID | (SEQ ID | (SEQ ID |
| 305-309) | NO: 365) | NO: 366) | NO: 367) | NO: 368) | NO: 369) |
| S102P | S102P | S103P | S105P | S98P | S102P |
| V147L | I147L | V148L | I150L | I148L | V146L |
| V147M | I147M | V148M | I150M | I148M | V146M |
| N154S | N154S | N155S | N157S | N155S | N153S |
| V155M | V155M | V156M | V158M | V156S | V154M |
| G166E | G166E | G167E | G169E | G167E | G165E |
| C206Y | C206Y | C207Y | C209Y | C206Y | C205Y |
| G207E | G207E | G208E | G210E | K207E | G206E |
| S102P/ | S102P/ | S103P/ | S105P/ | S98P/ | S102P/ |
| F279L | F279L | F280L | F282L | F280L | F278L |
| F279L | F279L | F280L | F282L | F280L | F278L |
| R281Q | R281Q | — | R284Q | K282Q | R280Q |
| R284G | R284G | R285G | R287G | R285G | R283G |
| R284S | R284S | R285S | R287S | R285S | R283S |
| R284M | R284M | R285M | R287M | R285M | R283M |
| R284K | R284K | R285K | R287K | R285K | R283K |
| R284T | R284T | R285T | R287T | R285T | R283T |
| R197A | R197A | R198A | R200A | K197A | R196A |
| D205A | D205A | D206A | D208A | S205A | D204A |
| R310A | R310A | R311A | R313A | R311A | R309A |
| R293A | R293A | R294A | R296A | R294A | R292A |
| T294A | T294A | T295A | T297A | T295A | T293A |
| E296A | E296A | — | E299A | K297A | E295A |
| R197A/ | R197A/ | R198A/ | R200A/ | K197A/ | R196A/ |
| D205A | D205A | D206A | D208A | S205A | D204A |
| S272A/ | S272A/ | S273A/ | S275A/ | T273A/ | S271A/ |
| Q273A | Q273A | Q274A | Q276A | N274A | Q272A |
| R310A/ | R310A/ | R311A/ | R313A/ | R311A/ | R309A/ |
| E316A | E316A | E317A | E319A | D317A | E315A |
| E316A | E316A | E317A | E319A | D317A | E315A |
| E316N | E316N | E317N | E319N | D317N | E315N |
| E316Q | E316Q | E317Q | E319Q | D317Q | E315Q |
| S272A | S272A | S273A | S275A | T273A | S271A |
| R375A | S374A | R376A | R383A | R374A | R374A |
| R293A/ | R293A/ | R294A/ | R296A/ | R294A/ | R292A/ |
| T294A/ | T294A/ | T295A | T297A/ | T295A/ | T293A/ |
| E296A | E296A | | E299A | K297A | E295A |
| D231A | D231A | D232A | D234A | D231A | D230A |
| R232A | R232A | R233A | C235A | R232A | R231A |
| K236A | K236A | K237A | K239A | K236A | K235A |
| Q273A | Q273A | Q274A | Q276A | N274A | Q272A |
| S358A/ | S357A/ | H359A/ | S366A/ | S359A/ | S357A/ |
| E360A/ | E359A/ | E361A/ | E368A/ | E361A/ | E359A/ |
| S366A | S365A | S367A | S374A | S367A | S365A |
| D231A/ | D231A/ | D232A/ | D234A/ | D231A/ | D230A/ |
| R232A/ | R232A/ | R233A/ | C235A/ | R232A/ | R231A/ |
| K236A/ | K236A/ | K237A/ | K239A/ | K236A/ | K235A/ |
| R238A | R238A | R239A | R241A | R238A | R237A |
| S358A | S357A | H359A | S366A | S359A | S357A |
| E360A | E359A | E361A | E368A | E361A | E359A |
| S366A | S365A | S367A | S374A | S367A | S365A |
| R238A | R238A | R239A | R241A | R238A | R237A |
| S324A/ | S324A/ | S325A/ | S327A/ | G325A/ | S323A/ |
| S326A | S326A | S327A | S329A | S330A | S325A |

[1404] For example, modified STING variants include Tasmanian devil STING with the mutations C206Y (SEQ ID NO:350), or R284G (SEQ ID NO:351); a variant in which the CTT of human STING is replaced with the CTT of Tasmanian devil STING (SEQ ID NO:352); human STING with the mutation C206Y (SEQ ID NO:353), or R284G (SEQ ID NO:354), and where the CTT is replaced with the CTT of Tasmanian devil STING; wild-type human STING with a deletion in the TRAF6 binding domain (corresponding to residues 377-379 (DFS)) (SEQ ID NO:355); cat STING with the mutations C205Y (SEQ ID NO:357), or R283G (SEQ ID NO:358); and other such modified STING variants.

[1405] To determine the corresponding amino acid residues for the STING mutations, the wild-type STING protein sequences from various non-human species each were aligned with the wild-type human STING protein sequence (of the allelic variants of SEQ ID NO:305 (R232 allele) or SEQ ID NO:306 (H232 allele)). The alignments were performed using the Kalign sequence alignment tool, available from ebi.ac.uk/Tools/msa/kalign/, or the EMBOSS needle sequence alignment tool, available from ebi.ac.uk/Tools/psa/emboss_needle/. FIGS. 2-14 depict exemplary sequence alignments for human STING compared to STING proteins from Tasmanian devil, marmoset, cattle, cat, ostrich, crested ibis, coelacanth, zebrafish, boar, bat, manatee, ghost shark, and mouse species, respectively.

### STING GOF Hybrid Variants Demonstrate Significantly Enhanced Type I Interferon to NF-κB Activity Ratios in Dendritic Cells

[1406] In order to determine the optimal STING GOF mutant that would elicit the highest levels of the CD8⁺ T-cell chemokine CXCL10 in mice, a panel of STING mutants were tested in murine primary bone marrow-derived dendritic cells (BMDCs). These included the Tasmanian devil STING with the constitutively active human GOF mutations C206Y (tazSTING C206Y; SEQ ID NO:350), or R284G (tazSTING R284G; SEQ ID NO:351); murine STING with the constitutive GOF mutants C205Y (muSTING C205Y), or R283G (muSTING R283G); cat STING with the constitutive GOF mutants C205Y (catSTING C205Y; SEQ ID NO:357), or R283G (catSTING R283G; SEQ ID NO:358); as well as variants in which the CTT of human STING (SEQ ID NO:370) was replaced with the CTT of Tasmanian devil STING (SEQ ID NO:371), and containing either wild-type human STING (huSTING tazCTT; see, e.g., SEQ ID NO:352), or the human STING GOF mutations C206Y (huSTING C206Y tazCTT; see, e.g., SEQ ID NO:353), or R284G (huSTING R284G tazCTT; see, e.g., SEQ ID NO:354). Also included were human STING variants with the constitutive, GOF mutations C206Y (huSTING C206Y), or R284G (huSTING R284G).

[1407] To test these, murine bone marrow was isolated and flushed into 1.5 mL Eppendorf tubes, and spun at 1200 RPM for 5 minutes, to collect the bone marrow cells. Cells were washed once in RPMI-1640+10% FBS, then seeded in 96-well TC-treated plates in RPMI-1640+10% FBS with 20 ng/ml GM-CSF. Every 2 days, 50% of the medium was replaced with fresh complete media. After six days, non-adherent cells were pipetted off the wells and re-seeded at 1e5 cells per well in RPMI-1640+10% FBS in a 96-well plate for transfection. Cells were transfected using Viromer® RED, according to the manufacturer's instructions. Briefly, 200 ng of plasmid DNA from a panel of STING GOF mutants, as well as untransfected control, were diluted in the provided buffer, and mixed with 0.08 μL of Viromer® RED and incubated at room temperature for 15 minutes to allow the DNA/Viromer® RED complexes to form. The DNA/Viromer® RED complexes were then slowly added to each well of the 96-well plate (in duplicates), and the plate was incubated at 37° C. in a CO₂ incubator. Supernatants were harvested at 48 hours, and assayed for murine CXCL10 (IP-10) using a flow cytometry-based cytokine bead array (CBA), according to the manufacturer's protocol.

[1408] As shown in the table below, the construct that induced the highest expression of murine CXCL10 was human STING containing the GOF mutation R284G, and containing a replacement of the CTT of human STING with the CTT of Tasmanian devil STING (huSTING R284G tazCTT). The next highest expression of CXCL10 was induced by the human STING variant containing the GOF mutation C206Y (huSTING C206Y), and the Tasmanian devil STING construct containing the human STING GOF mutation R284G (tazSTING R284G). The human STING GOF mutants (huSTING C206Y and huSTING R284G) were more potent than the corresponding murine STING GOF mutants (muSTING C205Y and muSTING R283G, respectively), which were even less potent than the cat STING mutants containing the same GOF mutations (catSTING C205Y and catSTING R283G, respectively), in primary murine dendritic cells.

| Construct | muCXCL10 (pg/mL) |
|---|---|
| Untransfected | 11.48 ± 3.889 |
| huSTING C206Y | 861.0 ± 58.48 |
| huSTING R284G | 769.7 ± 95.16 |
| muSTING C205Y | 194 ± 27.15 |
| muSTING R283G | 230.1 ± 1.018 |
| huSTING C206Y tazCTT | 366.6 ± 42.61 |
| huSTING R284G tazCTT | 1326 ± 137.9 |
| tazSTING C206Y | 808.8 ± 95.78 |
| tazSTING R284G | 831.3 ± 30.15 |
| catSTING C205Y | 480.7 ± 24.94 |
| catSTING R283G | 376.2 ± 6.682 |

[1409] These data demonstrate that STING proteins obtained from other species, such as Tasmanian devil, can be combined with constitutive GOF human STING mutations, to elicit potent T-cell recruiting chemokines.

### STING GOF Hybrid Variants Demonstrate Significantly Enhanced Type I Interferon to NF-κB Activity Ratios in Human Monocytes

[1410] In order to demonstrate that the ratio of STING-induced type I interferon to NF-κB signaling can be altered using STING GOF hybrid variants from other species, a panel was tested in a human monocyte cell line. The panel included wild-type human STING (huSTING), and huSTING mutants with the constitutive human GOF mutations C206Y, or R284G; wild-type Tasmanian devil STING (tazSTING), and tazSTING mutants with the constitutive GOF mutations C206Y, or R284G; wild-type cat STING, and catSTING mutants with the constitutive GOF mutations C205, or R283G; murine STING mutants with the constitutive GOF mutations C205Y, or R283G; and the variants in which the CTT of human STING was replaced with the CTT of Tasmanian devil STING, and containing either wild-type human STING, or the human GOF STING mutations C206Y, or R284G. Also included were a wild-type human STING with a deletion in the TRAF6 binding domain (corresponding to residues 377-379, DFS, see, e.g., SEQ ID NO:355), and wild-type zebrafish STING.

[1411] For this experiment, the THP1-Dual™ KO STING cells were utilized, which have been altered to lack endogenous STING, and to also express Lucia™ luciferase, a secreted luciferase, placed under the control of the endogenous IFN-β promoter. Constitutively active STING GOF mutants then were identified, and ranked by measurement of IFN-β promoter induced expression of luciferase activity. These cells also express secreted embryonic alkaline phosphatase (SEAP), placed under the control of the endogenous NF-κB promoter, where the coding sequence of NF-κB has been replaced by the SEAP ORF using knock-in technology. NF-κB activity induced by STING GOF mutants can be assessed by monitoring SEAP production in the cell supernatants.

[1412] For this experiment, THP1-Dual™ KO STING cells were transfected using Viromer® RED, according to the manufacturer's instructions. Briefly, 200 ng of plasmid DNA from a panel of STING GOF mutants, as well as untransfected control, were diluted in the provided buffer, and mixed with 0.08 μL of Viromer® RED and incubated at room temperature for 15 minutes to allow the DNA/Viromer® RED complexes to form. The DNA/Viromer® RED complexes were then slowly added to each well of the 96-well plate (in duplicates), and the plate was incubated at 37° C. in a CO₂ incubator. In addition, the wild-type STING variants were treated with or without the STING agonist 3′5′ RpRp c-di-AMP (CDN, InvivoGen), an analog of the clinical compound ADU-S100, which was added to the cells after 24 hours of incubation at 10 μg/mL. Supernatants were harvested at 48 hours, and assayed for NF-κB-SEAP and IFN-Lucia reporter signals, according to the manufacturer's protocol. Briefly, 10 μL of the cell culture supernatants was added to 50 μL QUANTI-Blue™ reagent (InvivoGen) (which is used for measuring SEAP). NF-κB activation was determined by measuring NF-κB-induced SEAP activity on a SpectraMax® M3 Spectrophotometer (Molecular Devices), at an absorbance (Abs) wavelength of 650 nm. For measuring type I interferon activity from IFN-Lucia, 10 μL of the cell culture supernatants was added to 50 μL QUANTI-Luc™, containing the coelenterazine substrate for the luciferase reaction, which produces a light signal that is quantified using a SpectraMax® M3 luminometer, and expressed as relative light units (RLUs).

[1413] As shown in the table below, the highest type I IFN responses were observed from the variant in which the CTT of human STING was replaced with the CTT of Tasmanian devil STING, and that contained the human STING GOF mutation R284G (huSTING R284G tazCTT), as well as from the wild-type zebrafish STING with the CDN STING agonist (zfSTING WT+CDN). However, unlike the wild-type zebrafish STING, which had very high NF-κB signaling, the huSTING R284G tazCTT variant had high type I IFN signaling with much lower NF-κB signaling activity. The best ratio of higher type I IFN to lower NF-κB signaling was found with the Tasmanian devil STING variant containing the human STING GOF mutation R284G (tazSTING R284G).

| | ISRE- | | NF-κB- | |
|---|---|---|---|---|
| | Lucia ™ | | SEAP | |
| STING Variant | (RLUs) | ±SD | (Abs) | ±SD |
| Untransfected | 47.96 | 33.91 | 0.065 | 0.007 |
| huSTING WT + CDN | 170.8 | 38.15 | 0.100 | 0.014 |
| huSTING WT delTRAF6 + CDN | 164.8 | 8.48 | 0.120 | 0.014 |
| huSTING WT tazCTT + CDN | 31.47 | 10.59 | 0.060 | 0.000 |
| tazSTING WT + CDN | 143.9 | 4.24 | 0.090 | 0.014 |
| zfSTING WT + CDN | 310.2 | 23.31 | 0.690 | 0.028 |
| CMV catSTING WT WPRE + CDN | 202.3 | 6.36 | 0.125 | 0.007 |
| huSTING C206Y | 175.3 | 36.03 | 0.105 | 0.007 |
| huSTING R284G | 143.9 | 29.67 | 0.100 | 0.000 |
| huSTING C206Y tazCTT | 137.9 | 21.19 | 0.095 | 0.007 |
| huSTING R284G tazCTT | 301.2 | 61.46 | 0.250 | 0.127 |
| tazSTING C206Y | 199.3 | 2.12 | 0.120 | 0.000 |
| tazSTING R284G | 217.3 | 19.08 | 0.105 | 0.007 |
| muSTING C205Y | 43.46 | 2.12 | 0.070 | 0.000 |
| muSTING R283G | 32.97 | 4.24 | 0.070 | 0.000 |
| catSTING C205Y | 202.3 | 23.31 | 0.135 | 0.007 |
| catSTING R283G | 157.4 | 10.60 | 0.120 | 0.000 |

SD = Standard deviation

[1414] These data further demonstrate using non-human STING proteins, such as the STING protein from Tasmanian devil, and combining them with human constitutive gain-of-function STING mutations, in order to enhance the beneficial type I interferon activity, while minimizing the immunosuppressive NF-κB activity, in human monocytes.

### Example 18

### S. typhimurium Lipoprotein Knockout by Deletion of the lppA and lppB Genes

[1415] The live attenuated S. typhimurium YS1646 strain, containing the Δasd/ΔFLG/ΔpagP/ΔansB/ΔcsgD gene deletions, was engineered to delete the lppA (SEQ ID NO:387) and lppB (SEQ ID NO:388) genes, in order to remove membrane surface lipoproteins. This reduces pro-inflammatory TLR2 activation, which reduces immunosuppressive cytokines and improves anti-tumor adaptive immunity. As shown below, this also enhances plasmid delivery and encoded protein expression in the tumor.

### Strain Engineering and Characterization

[1416] Deletion of lppA Gene

[1417] The lppA gene was deleted from the chromosome of the YS1646Δasd/ΔFLG/ΔpagP/ΔansB/ΔcsgD strain using modifications of the method of Datsenko and Wanner (Proc. Natl. Acad. Sci. U.S.A. 97:6640-6645 (2000)), as described in detail above. Synthetic lppA gene homology arm sequences that contained 231 and 200 bases of the left hand and right hand sequence, respectively, flanking the lppA gene, were synthesized and cloned into a plasmid called pSL0148 (SEQ ID NO:231). The sequence for the lppA gene is shown in SEQ ID NO:387; appropriate primers for PCR amplification were designed using the gene sequence. A kanamycin gene cassette flanked by cre/loxP sites then was cloned into plasmid pSL0148, and the lppA gene knockout cassette was then PCR amplified with primers lppA-1 and lppA-2, gel purified, and then introduced into the YS1646Δasd/ΔFLG/ΔpagP/ΔansB/ΔcsgD strain carrying the temperature sensitive lambda red recombination plasmid pKD46, by electroporation. Electroporated cells were recovered in SOC+DAP medium, and plated onto LB agar plates supplemented with kanamycin (20 μg/mL) and diaminopimelic acid (DAP, 50 μg/mL). Colonies were selected and screened for insertion of the knockout fragment by PCR using primers lppA-3 and lppA-4. pKD46 then was cured by culturing the selected kanamycin resistant strain at 42° C. and screening for loss of ampicillin resistance. The kanamycin resistance marker then was cured by electroporation of a temperature-sensitive plasmid expressing the Cre recombinase (pJW168), and Amp^{R} colonies were selected at 30° C.; pJW168 was subsequently eliminated by growing cultures at 42° C. Selected lppA knockout clones were then tested for loss of the kanamycin marker by PCR, using primers flanking the sites of disruption (lppA-3 and lppA-4), and evaluation of the electrophoretic mobility was performed on agarose gels. This mutant derivative of strain YS1646 was designated YS1646Δasd/ΔFLG/ΔpagP/ΔansB/ΔcsgD/ΔlppA.

[1418] Deletion of lppB Gene

[1419] The lppB gene then was deleted in the YS1646Δasd/ΔFLG/ΔpagP/ΔansB/ΔcsgD/ΔlppA strain using modifications of the methods described above. Synthetic lppB gene homology arm sequences that contained 224 and 231 bases of the left hand and right hand sequence, respectively, flanking the lppB gene, were synthesized and cloned into a plasmid called pSL0148 (SEQ ID NO:231). The sequence for the lppB gene is shown in SEQ ID NO:388; appropriate primers for PCR amplification were designed using the gene sequence. A kanamycin gene cassette flanked by cre/loxP sites then was cloned into plasmid pSL0148, and the lppB gene knockout cassette was PCR amplified with primers lppB-5 and lppB-6, gel purified, and introduced into strain YS1646Δasd/ΔFLG/ΔpagP/ΔansB ΔcsgD/ΔlppA, carrying the temperature-sensitive lambda red recombination plasmid pKD46, by electroporation. The kanamycin resistance gene then was cured by Cre-mediated recombination as described above, and the temperature-sensitive plasmids were cured by growth at non-permissive temperature. The lppA and lppB gene knockout sequences were amplified by PCR, using primers designated lppA-3 and lppA-4, and lppB-7 and lppB-8, respectively, and verified by DNA sequencing. This mutant derivative of strain YS1646 was designated YS1646Δasd/ΔFLG/ΔpagP/ΔansB/ΔcsgD/ΔlppAB, or nicknamed YS1646ΔlppAB.

In Vitro Characterization of Engineered S. typhimurium Lipoprotein Knockout Strain

[1420] The YS1646Δasd/ΔFLG/ΔpagP/ΔansB/ΔcsgD/ΔlppAB strain, harboring the deletions of lppA and lppB, was evaluated for growth by overnight cultures in LB. Growth was measured using a SpectraMax® M3 Spectrophotometer (Molecular Devices) at 37° C., reading the OD₆₀₀ every 15 minutes. The results demonstrated that strain YS1646Δasd/ΔFLG/ΔpagP/ΔansB/ΔcsgD/ΔlppAB was able to replicate in LB at a growth rate comparable to the parental YS1646Δasd/ΔFLG/ΔpagP/ΔansB/ΔcsgD strain. These data demonstrate that the elimination of lipoprotein does not decrease the fitness of S. typhimurium in vitro.

### Lipoprotein Deletion Enhances Plasmid Delivery to the Tumor After Systemic Administration

[1421] As TLR2 is expressed on vascular endothelial cells, and activation of TLR2 enhances vascular permeability, the effect of the ΔlppAB modification, and the subsequent reduction in TLR2 agonism, on tumor colonization was assessed. The effect on payload expression also was assessed. As shown below, while colonization of tumors was somewhat reduced, plasmid delivery and encoded gene expression was significantly increased, following systemic administration.

[1422] To demonstrate the impact of the lipoprotein knockout strains in a murine model of triple-negative breast cancer, 6-8 week-old female BALB/c mice (4 mice per group) were inoculated orthotopically in the 4^{th} mammary fat pad with EMT6 cells (5×10⁵ cells in 100 μL PBS). Mice bearing 10-day established flank tumors were IV injected with a single dose of 1×10⁷ CFUs of the YS1646Δasd/ΔFLG/ΔpagP/ΔansB/ΔcsgD/ΔlppAB strain, or the parental YS1646Δasd/ΔFLG/ΔpagP/ΔansB/ΔcsgD strain, each containing a plasmid encoding a luciferase protein (NanoLuciferase® luciferase, or NanoLuc®; Promega) that is secreted (secNanoLuc®), under the control of the CMV promoter. At day 7 post IV dosing, mice were euthanized, and tumors were homogenized and plated on LB plates, to enumerate the number of colony forming units (CFUs) per gram of tumor tissue. The parental YS1646Δasd/ΔFLG/ΔpagP/ΔansB/ΔcsgD strain colonized tumors at a mean of 3.3×10⁶ CFUs per gram of tumor tissue, while the lipoprotein-deleted YS1646Δasd/ΔFLG/ΔpagP/ΔansB/ΔcsgD/ΔlppAB strain colonized the tumors with a 2-fold decreased mean of 1.18×10⁶ CFUs/g of tumor tissue.

[1423] In order to measure plasmid delivery to the tumor, and subsequent heterologous gene expression and protein secretion, the activity of the secNanoLuc® was measured. For this, homogenized tumors were assessed for luciferase activity using the NanoGlo® detection reagent (Promega), and read on a SpectraMax® M3 Spectrophotometer/Luminometer (Molecular Devices). While the parental YS1646Δasd/ΔFLG/ΔpagP/ΔansB/ΔcsgD strain induced average luminescence relative light units (RLUs) of 4482.6, the YS1646Δasd/ΔFLG/ΔpagP/ΔansB/ΔcsgD/ΔlppAB strain induced a nearly 10-fold increased average of 33,926.6 RLUs. These data demonstrate the ability of the lipoprotein-deleted strain to improve tumor colonization, and to enhance payload expression.

[1424] These data reveal that, while deletion of lipoprotein somewhat reduces tumor colonization after IV dosing, it significantly enhances plasmid delivery and payload expression in the tumor. These data demonstrate that, contrary to the expectation from the art that deletion of these genes will decrease colonization, lipoprotein deletion enhances plasmid delivery and protein expression in the tumor microenvironment, and in tumors.

### Example 19

### Salmonella Full purI Clean Deletion Gene Knockout Strain Engineering and Characterization

[1425] The purI gene in strain YS1646 (VNP20009) was not deleted; it was disrupted by a transposon (Tn10) insertion that resulted in a 16.6 kbp (kilobase pair) genomic inversion event, whereby two insertion sequence (IS) elements were subsequently incorporated into the genome, one within the purI (purM) gene, and the other 16.6 kbp upstream, in the intergenic region directly flanking the 3′-end of the acrD gene. The region between the two IS elements is inverted and contains 18 genes, including yffB, DC51_2568, upp, uraA, yfgE, yfgD, DC51_2573, perM, purC, and others. The insertion sequence element in the intergenic region encodes a fully functional transposase (see, e.g., Broadway et al. (2014) J. Biotechnology 192:177-178). The presence of such a transposase in a therapeutic strain presents a possible genetic stability concern. These elements were removed from the strain, for development of the strain as a human therapy. The presence of the complete genetic sequence of the purI gene, disrupted by means of a chromosomal reengagement, leaves open the possibility of reversion to a wild-type gene.

[1426] The msbB gene in strain YS1646 also was not fully deleted, but was disrupted by a genetically engineered 511 bp deletion (of the 972 bp gene) that resulted in an extension of the pykA gene (encoding pyruvate kinase), replacing the last 5 amino acid codons with 13 new codons (see, e.g., Broadway et al. (2014) J. Biotechnology 192:177-178).

[1427] Strain YS1646Δasd/ΔFLG/ΔpagP/ΔansB/ΔcsgD was modified to delete the remaining portions of the purI gene and the two transposon-associated insertion sequence elements present in strain YS1646. It is shown below, that with a full knockout of purI, the resulting bacterial cells have higher viability than the cells in which the gene is inactivated by disruption, as in the parental YS1646 strain.

[1428] A. Deletion of purI Gene Fragments and Transposon-Associated Insertion Sequence Elements

[1429] A first region, located between the yffB and purN genes, and containing: 1) a 1,209 bp transposon insertion sequence element, annotated as DC51_2586 in the sequence obtained from Broadway et. al (2014) (see, GenBank Accession numbers CP007804 and CP008745); and 2) 740 bp of the remaining 891 bp purI gene fragment (referred to herein as the large purI gene fragment), was targeted for deletion, using modifications of the method of Datsenko and Wanner (see, Proc. Natl. Acad. Sci. U.S.A. 97:6640-6645 (2000)). A small 151 bp portion of the 891 bp (large) purI gene fragment was left intact to avoid affecting the adjacent, downstream gene, purN. A plasmid, pSL0165, containing 284 and 262 bps of homology to the left hand and right hand regions, respectively, of the DC51_2586 insertion sequence element and the purI gene fragment, was transformed into DH5-alpha competent cells (Thermo Fisher Scientific). A kanamycin gene cassette flanked by loxP sites was cloned into this plasmid, and the resulting vector was designated pSL0174. The DC51_2586 insertion sequence element and the large purI gene fragment knockout cassette then was PCR amplified using primers purm-1 and purm-2 (SEQ ID NOs: 419 and 420, respectively; see Table 2 below), gel purified, and introduced into strain YS1646Δasd/ΔFLG/ΔpagP/ΔansB/ΔcsgD carrying the temperature sensitive lambda red recombination plasmid pKD46, by electroporation. The kanamycin resistance gene then was cured by Cre-mediated recombination, as described above, and the temperature-sensitive plasmids were cured by growth at non-permissive temperature. The DC51_2586 insertion sequence element and large purI gene fragment knockout sequences were confirmed by PCR using primers purm-3 and purm-4 (SEQ ID NOs: 421 and 422, respectively; see Table 2), and verified by DNA sequencing. The resulting mutant derivative of parental strain YS1646Δasd/ΔFLG/ΔpagP/ΔansB/ΔcsgD was designated YS1646Δasd/ΔFLG/ΔpagP/ΔansB/ΔcsgD/ΔpurI_{(large clean)}.

[1430] A second region, located between the acrD and DC51_2568 genes, and containing: 1) a 1,209 bp transposon insertion sequence element, annotated as DC51_2566 in the sequence obtained from Broadway et. al (2014) (see, GenBank Accession numbers CP007804 and CP008745); and 2) the remaining 231 bp purI gene fragment (referred to herein as the small purI gene fragment), was targeted for deletion, using modifications of the method of Datsenko and Wanner (see, Proc. Natl. Acad. Sci. U.S.A. 97:6640-6645 (2000)). A plasmid, pSL0210, containing 241 and 265 bps of homology to the left hand and right hand regions, respectively, of the DC51_2566 insertion sequence element and the small purI gene fragment, was transformed into DH5-alpha competent cells (Thermo Fisher Scientific). A kanamycin gene cassette flanked by loxP sites was cloned into this plasmid, and the resulting vector was designated pSL0212. The DC51_2566 insertion sequence element and the small purI gene fragment knockout cassette then was PCR amplified using primers acrd-1 and purm-5 (SEQ ID NOs: 425 and 423, respectively; see, Table 2), gel purified, and introduced into strain YS1646Δasd/ΔFLG/ΔpagP/ΔansB/ΔcsgD/ΔpurI_{(large clean)} carrying the temperature sensitive lambda red recombination plasmid pKD46, by electroporation. The kanamycin resistance gene then was cured by Cre-mediated recombination, as described above, and the temperature-sensitive plasmids were cured by growth at non-permissive temperature. The DC51_2566 insertion sequence element and small purI gene fragment knockout sequences were confirmed by PCR using primers purm-6 and acrd-3 (SEQ ID NOs: 424 and 426, respectively; see Table 2), and verified by DNA sequencing. The resulting mutant derivative of parental strain YS1646Δasd/ΔFLG/ΔpagP/ΔansB/ΔcsgD/ΔpurI_{(large clean)} was designated as YS1646Δasd/ΔFLG/ΔpagP/ΔansB/ΔcsgD/ΔpurI_{(full clean)}, or alternatively, YS1646Δasd/ΔFLG/ΔpagP/ΔansB/ΔcsgD/F-ΔpurI.

TABLE 2
Primer Sequence Information

| | | | SEQ ID |
|---|---|---|---|
| Primer | Primer Sequence | Primer Description | NO. |
| purm-1 | ccagatgtggcttgtttatacttcgc | Fwd primer for amplifying the | 419 |
| | | DC51_2586 insertion sequence element | |
| | | and the large purI (740 bp) fragment | |
| | | gene KO cassette | |
| purm-2 | ccttattgctgaatactgccctgag | Rev primer for amplifying the | 420 |
| | | DC51_2586 insertion sequence element | |
| | | and the large purI (740 bp) gene | |
| | | fragment KO cassette | |
| purm-3 | cgtgtcgcaattcttaatgccatag | Fwd primer for checking DC51_2586 | 421 |
| | | insertion sequence element and the | |
| | | large purI (740 bp) gene fragment KO | |
| purm-4 | caaacatcggactcagaatacgc | Rev primer for checking DC51_2586 | 422 |
| | | insertion sequence element and the | |
| | | large purI (740 bp) gene fragment KO | |
| purm-5 | caggcgataaaggctaacaaccg | Rev primer for amplifying the | 423 |
| | | DC51_2566 insertion sequence element | |
| | | and the small purI (231 bp) gene | |
| | | fragment KO cassette | |
| purm-6 | ttgacctggatcaaccaaaagcg | Rev primer for checking the | 424 |
| | | DC51_2566 insertion sequence element | |
| | | and the small purI (231 bp) gene | |
| | | fragment KO | |
| acrd-1 | cctgcgaccgatactgatgac | Fwd primer for amplifying the | 425 |
| | | DC51_2566 insertion sequence element | |
| | | and the small purI (231 bp) gene | |
| | | fragment KO cassette | |
| acrd-3 | gctactcgctacctggatgc | Fwd primer for checking the | 426 |
| | | DC51_2566 insertion sequence element | |
| | | and the small purI (231 bp) gene KO | |

Fwd = forward; Rev = reverse; KO = knockout

### Plasmid Information

| | | Vector | Homology | |
|---|---|---|---|---|
| | | Name after | Arm Length | |
| | Synthetic | Kanamycin | Left | Right |
| Gene Sequence | DNA Vector | Cloning | Hand | Hand |
| purI large | pSL0165 | pSL0174 | 284 bp | 262 bp |
| (740 bp) fragment | | | | |
| purI small | pSL0210 | pSL0212 | 241 bp | 265 bp |
| (231 bp) fragment | | | | |

[1432] B. Strain YS1646Δasd/ΔFLG/ΔpagP/ΔansB/ΔcsgD/F-ΔpurI Displays Enhanced Injection Stock Cell Viability

[1433] To evaluate the effects of the deletions of the remaining purI gene sequence fragments and the transposon-associated insertion sequence elements on the in vitro fitness of the bacteria, the cell viability of strains of YS1646Δasd/ΔFLG/ΔpagP/ΔansB/ΔcsgD, with and without the full purI gene deletion (F-ΔpurI), and carrying the same plasmids, was compared.

[1434] The cell viability of strains of YS1646Δasd/ΔFLG/ΔpagP/ΔansB/ΔcsgD/F-ΔpurI, containing either plasmid ADN-657 (pATI1.76 CMV muIL-15Rα-IL-15sc_T2A_huSTING N154S/R284G tazCTT HPRE bGHpA), or plasmid ADN-750 (pATI2.1 CMV VCIP huIL-15Rα-IL-15sc_T2A_huSTINGN154S/R284G tazCTT HPRE bGHpA), and the cell viability of strains of YS1646Δasd/ΔFLG/ΔpagP/ΔansB/ΔcsgD, expressing the same plasmids (ADN-657 and ADN-750), was evaluated by directly comparing viable CFUs after culture processing for frozen injection stocks. Plasmid ADN-657 encodes murine IL-15Rα-IL-15sc and a modified human STING chimera, with a replacement of the CTT of human STING with the CTT of Tasmanian devil STING, and the GOF mutations N154S/R284G (huSTING N154S/R284G tazCTT). The two payloads are expressed under the control of a CMV promoter, from a bicistronic construct comprising a T2A peptide. The construct also includes a Hepatitis B virus Posttranscriptional Regulatory Element (HPRE), and a bovine growth hormone polyadenylation signal sequence (bGHpA). Plasmid ADN-750 encodes human IL-15Rα-ILL-15sc and the same modified human STING chimera, where expression of the two payloads is under control of a CMV promoter, and the single promoter system is achieved using an endogenous human IRES (Internal Ribosome Entry Site), known as Vascular Endothelial Growth Factor and Type 1 Collagen Inducible Protein (VCIP; SEQ ID NO:434), placed upstream of the nucleic acid encoding both payloads, as well as a T2A peptide sequence, placed between the two ORFs.

[1435] For this experiment, 100 μl of overnight stationary phase cultures, of equivalent OD_{600 nm} optical density (OD) values, were used to inoculate 25 ml of 4×YT media in 250 ml baffled shaker flasks with vented caps, and the cultures were incubated at 37° C. with shaking (at 225 RPM) for approximately 6 hours. Cultures were harvested at stationary phase at equivalent OD_{600 nm} values, washed twice, adjusted to OD_{600 nm}=2, aliquoted, and frozen at −80° C. The following day, two aliquots of each strain were thawed, the OD_{600 nm} values were measured, and the strains were plated on agar plates to determine the titer and viability. % viability was determined from the ratio of OD_{600 nm} to CFUs/ml.

[1436] Strain YS1646Δasd/ΔFLG/ΔpagP/ΔansB/ΔcsgD/F-ΔpurI-(ADN-657) injection stock was determined to be 77% viable, while strain YS1646Δasd/ΔFLG/ΔpagP/ΔansB/ΔcsgD-(ADN-657) injection stock was determined to be 62% viable. Strain YS1646Δasd/ΔFLG/ΔpagP/ΔansB/ΔcsgD/F-ΔpurI-(ADN-750) injection stock was determined to be 72% viable, while strain YS1646Δasd/ΔFLG/ΔpagP/ΔansB/ΔcsgD-(ADN-750) injection stock was determined to be 63% viable.

[1437] These data demonstrate a similar or enhanced fitness profile for strain YS1646Δasd/ΔFLG/ΔpagP/ΔansB/ΔcsgD/F-ΔpurI compared to the parental strain, YS1646Δasd/ΔFLG/ΔpagP/ΔansB/ΔcsgD. Strain YS1646Δasd/ΔFLG/ΔpagP/ΔansB/ΔcsgD/F-ΔpurI displayed improved viability following frozen injection stock preparation, indicating that the genomic deletions not only diminish a potential genetic instability issue, but also provide a metabolic benefit that is manifested as increased cell viability.

[1438] C. Strain YS1646Δasd/ΔFLG/ΔpagP/ΔansB/ΔcsgD/F-ΔpurI Displays Similar Growth Characteristics in Broth Media Compared to the YS1646Δasd/ΔFLG/ΔpagP/ΔansB/ΔcsgD Parental Strain

[1439] To evaluate the effects of the deletions of the remaining purI gene sequence fragments and the transposon-associated insertion sequence elements on the in vitro fitness of the bacterial strains, broth medium growth was compared between strains of YS1646Δasd/ΔFLG/ΔpagP/ΔansB/ΔcsgD/F-ΔpurI, expressing either plasmid ADN-657 (pATI1.76 CMV muIL-15Rα-IL-15sc_T2A_huSTINGN154S/R284G tazCTT HPRE bGHpA) or plasmid ADN-750 (pATI2.1 CMV VCIP huIL-15Rα-IL-15sc_T2A_huSTING N154S/R284G tazCTT HPRE bGHpA), and strains of YS1646Δasd/ΔFLG/ΔpagP/ΔansB/ΔcsgD, expressing the same plasmids (ADN-657 and ADN-750). Frozen injection stocks were thawed at room temperature, and normalized to 1×10⁷ CFU/mL by diluting in PBS. 10 μL of the normalized samples were used to inoculate 300 μL of LB media (1×10⁵ CFU/well) in a clear, flat-bottomed 96-well plate in technical quadruplicate. The plate was incubated with shaking at 37° C., and the OD_{600 nm} values were monitored in 15 minute intervals over the course of 16 hours. OD_{600 nm} values were plotted to construct growth curves, and the slope of the log phase of growth was calculated and used to determine the doubling time for each strain.

[1440] Each of strains YS1646Δasd/ΔFLG/ΔpagP/ΔansB/ΔcsgD/F-ΔpurI-(ADN-657), YS1646Δasd/ΔFLG/ΔpagP/ΔansB/ΔcsgD-(ADN-657), YS1646Δasd/ΔFLG/ΔpagP/ΔansB/ΔcsgD/F-ΔpurI-(ADN-750) and YS1646Δasd/ΔFLG/ΔpagP/ΔansB/ΔcsgD-(ADN-750) generated comparable growth profiles, and reached similar cell densities at stationary phase. Strain YS1646Δasd/ΔFLG/ΔpagP/ΔansB/ΔcsgD/F-ΔpurI-(ADN-657) had a doubling time of 77 minutes, strain YS1646Δasd/ΔFLG/ΔpagP/ΔansB/ΔcsgD-(ADN-657) had a doubling time of 62 minutes, strain YS1646Δasd/ΔFLG/ΔpagP/ΔansB/ΔcsgD/F-ΔpurI-(ADN-750) had a doubling time of 72 minutes, and strain YS1646Δasd/ΔFLG/ΔpagP/ΔansB/ΔcsgD-(ADN-750) had a doubling time of 63 minutes. These data demonstrate a similar fitness profile for strain YS1646Δasd/ΔFLG/ΔpagP/ΔansB/ΔcsgD/F-ΔpurI compared to the parental strain, YS1646Δasd/ΔFLG/ΔpagP/ΔansB/ΔcsgD. Strain YS1646Δasd ΔFLG/ΔpagP/ΔansB/ΔcsgD/F-ΔpurI displayed slightly increased doubling time in broth medium, but generated similar growth curve profiles and stationary phase cell densities, compared to the parental strain.

### Example 20

### Genetically Modified Strains Reduce Inflammation in Whole Human Blood and in Primary Human Macrophages

[1441] To evaluate the inflammatory profiles resulting from the administration of different variants of the immunostimulatory bacterial strains, strains ATCC #14028 (wild-type (WT) S. typhimurium), YS1646, YS1646Δasd, YS1646Δasd/ΔFLG, YS1646Δasd/ΔFLG/ΔpagP, YS1646Δasd/ΔFLG/ΔpagP/ΔansB/ΔcsgD, YS1646Δasd/ΔFLG/ΔpagP/ΔansB/ΔcsgD/F-ΔpurI, and E. coli strain NEB 5-alpha, each carrying plasmids (CMV NanoLuc®) that encode the luciferase NanoLuciferase® (Promega), were incubated with human blood for 2 hours at 37° C. The incubations were in performed in a 96-well format, with 200 μl of blood and 5×10³ CFUs of bacteria. At 2 hours post-infection, the blood was centrifuged at 300 relative centrifugal force (rcf) for 5 minutes, and serum was isolated for cytokine profile analysis by human antiviral cytokine bead array analysis (BioLegend), in accordance with the manufacturer's instructions.

[1442] Analysis of the levels of cytokines released from the human blood, following incubation with the various strains, showed that incubation with strain YS1646 resulted in reduced the levels of the pro-inflammatory cytokines IL-6 and TNF-α, compared to incubation with WT strain ATCC 14028. Additional genomic modifications further reduced the levels of pro-inflammatory cytokines released from the human blood.

| | Cytokine Levels | | | |
|---|---|---|---|---|
| | IL-6 | | TNF-α | |
| | Mean | | Mean | |
| Strain | (pg/ml) | STDEV | (pg/ml) | STDEV |
| Uninfected control | 18.8 | ±1.1 | 69.2 | ±2.9 |
| Wild-type S. typhimurium | 155.1 | ±32.7 | 464.3 | ±77.9 |
| strain ATCC 14028 | | | | |
| (CMV NanoLuc ®) | | | | |
| YS1646 (CMV NanoLuc ®) | 48.1 | ±20.4 | 105.0 | ±24.4 |
| YS1646Δasd (CMV | 19.3 | ±1.2 | 68.4 | ±6.1 |
| NanoLuc ®) | | | | |
| YS1646Δasd/ΔFLG | 23.7 | ±4.4 | 78.3 | ±6.0 |
| (CMV NanoLuc ®) | | | | |
| YS1646Δasd/ΔFLG/ | 17.1 | ±5.7 | 57.8 | ±19.9 |
| ΔpagP (CMV NanoLuc ®) | | | | |
| YS1646Δasd/ΔFLG/ | 21.1 | ±7.6 | 74.2 | ±33.4 |
| ΔpagP/ΔansB/ΔcsgD | | | | |
| (CMV NanoLuc ®) | | | | |
| YS16A6Δasd/ΔFLG/ | 21.0 | ±1.3 | 75.1 | ±4.9 |
| ΔpagP/ΔansB/ΔcsgD/ | | | | |
| F-ΔpurI (CMV NanoLuc ®) | | | | |
| E. coli NEB 5-alpha | 152.9 | ±24.1 | 519.0 | ±236.5 |
| (CMV NanoLuc ®) | | | | |

STDEV = standard deviation

[1443] To determine the how the genomic modifications in bacteria, such as S. typhimurium, influence inflammation during infection of primary human myeloid cells, bactofection of human M2 macrophages was performed. Primary human monocytes were differentiated in ImmunoCult™-SF Macrophage Medium (StemCell Technologies), containing 100 ng/ml human macrophage colony-stimulating factor (M-CSF), for 5 days. On day 6, cells were supplemented with additional medium containing 150 ng/ml M-CSF and 60 ng/ml huIL-4 for 48 hours, to generate M2 macrophages. The cells then were infected with stationary phase bacterial strains (strains described above), which were grown overnight at 37° C. in 4×YT medium, at an MOI of 10. The cells were inoculated with bacteria, and centrifuged for 5 minutes at 500 rcf, followed by an incubation at 37° C. for 1 hour. The cells then were washed twice with DPBS, and then incubated in fresh ImmunoCult™-SF Macrophage Medium with 100 μg/ml gentamicin. Supernatants were harvested at 0, 2, 6, 24, and 48 hours post-infection. The cytokine measurements were performed by MESO scale analysis, according to the manufacturer's instructions.

[1444] The results, which are summarized in the table below, show that, at 24 hours post-infection, macrophages infected with strains YS1646, YS1646Δasd, and YS1646Δasd/ΔFLG released the highest levels of IL-6, with WT bacteria (strain ATCC 14028) inducing less IL-6. Successive genomic modifications resulting in decreased levels of IL-6 secretion, with strains YS1646Δasd/ΔFLG/ΔpagP/ΔcsgD and YS1646Δasd/ΔFLG/ΔpagP/ΔansB/ΔcsgD inducing the lowest levels of IL-6. Similar trends were observed with TNF-α.

| | Cytokine Levels, 24 hours | | | |
|---|---|---|---|---|
| | IL-6 | | TNF-α | |
| | Mean | Range | Mean | Range |
| Strain | (pg/ml) | (pg/ml) | (pg/ml) | (pg/ml) |
| Uninfected control | 1.1 | — | 1.23 | — |
| Wild-type S. typhimurium | 10450.7 | 285.0 | 2895.508 | 230.262 |
| strain ATCC 14028 | | | | |
| (CMV NanoLuc ®) | | | | |
| YS1646 (CMV NanoLuc ®) | 13653.2 | 332.3 | 5282.976 | 71.708 |
| YS1646Δasd (CMV | 14516.3 | 693.3 | 5100.7465 | 793.867 |
| NanoLuc ®) | | | | |
| YS1646Δasd/ΔFLG | 13767.5 | 1540.7 | 3572.248 | 150.534 |
| (CMV NanoLuc ®) | | | | |
| YS1646Δasd/ΔFLG/ | 6985.6 | 650.2 | 758.4872 | 136.6448 |
| ΔpagP (CMV NanoLuc ®) | | | | |
| YS1646Δasd/ΔFLG/ΔpagP/ | 6746.1 | 622.0 | 1431.149 | 367.154 |
| ΔcsgD (CMV NanoLuc ®) | | | | |
| YS1646Δasd/ΔFLG/ΔpagP/ | 6584.1 | 1389.7 | 502.1081 | 44.983 |
| ΔansB/ΔcsgD (CMV | | | | |
| NanoLuc ®) | | | | |

### Example 21

### csgD-Deleted Strains Induce Vascular Leakage in Human Vascular Endothelial Cells

[1445] The ability to promote vascular leakage is an advantageous feature for facilitating bacterial entry into the tumor vasculature, and for promoting greater tumor colonization. It is shown in this example that ΔcsgD strains possess this feature.

[1446] Parental strain YS1646 was compared to the derivative strains YS1646Δasd/ΔFLG/ΔpagP and YS1646Δasd/ΔFLG/ΔpagP/ΔansB/ΔcsgD, for the ability to activate innate immune sensing in human umbilical vein endothelial cells (HUVECs), and for the ability to stimulate a subsequent increase in endothelial monolayer permeability. This was assessed using an In Vitro Vascular Permeability Assay kit (Millipore, Catalog No. ECM642). Strains of YS1646Δasd/ΔFLG/ΔpagP and YS1646Δasd/ΔFLG/ΔpagP/ΔansB/ΔcsgD, each containing a plasmid encoding secreted NanoLuciferase® (EF-1α secNanoLuc®), were used. Human umbilical vein endothelial cells (HUVECs) were seeded onto semi-permeable collagen-coated membrane inserts, in a 96-well plate chamber, according to the manufacturer's instructions, at a concentration of 5×10⁵ cells/well. Confluency was monitored daily, until endothelial monolayer formation was confirmed, and determined to efficiently occlude the membrane pores (96 hours post-seeding).

[1447] The bacterial strains were grown in 3 mL of 4×YT media (TEKNOVA, Catalog No. 2Y1085), with shaking at 37° C. in vented cap 50 mL conical vials, overnight to stationary phase, and were prepared the following day by pelleting and re-suspending in PBS. Bacterial samples were normalized by OD_{600 nm} to a concentration of 2.5×10⁸ CFU/mL, and were added to the HUVEC insert wells in 100 μL volume, to achieve an MOI of 50. The plate was spun at 500 rcf for 5 minutes to synchronize engagement of CFUs with HUVECs, and then the plate was incubated for 1 hour at 37° C. Gentamicin was then added to the insert wells to a final concentration of 200 μg/mL. At 24 hours post-bactofection, medium in the inserts was collected (and saved for cytokine analysis), and 75 μL of Fluorescein isothiocyanate-Dextran (FITC-Dextran; at a 1:40 dilution) was added, and the mixture was incubated in the dark, at room temperature, for 20 minutes. Medium from the receiver tray was collected and analyzed on a spectrophotometer at an excitation wavelength of 485 nm and an absorbance wavelength of 535 nm, and 1:40 FITC-Dextran solution was run directly as a positive control.

[1448] At 24 hours post-bactofection, and following incubation with FITC-Dextran solution, wells that were not treated with engineered, attenuated S. typhimurium strains (i.e., medium alone) generated very low fluorescence values (35), indicating confluency and little disruption of permeability. The parental YS1646-treated wells permitted the greatest amount of FITC-Dextran to pass through the membrane (fluorescence=155), indicating the strongest innate immune stimulation and increase in vascular permeability, while the engineered, attenuated S. typhimurium strains YS1646Δasd/ΔFLG/ΔpagP and YS1646Δasd/ΔFLG/ΔpagP/ΔansB/ΔcsgD permitted less FITC-Dextran to pass through (fluorescence=84 and 91, respectively), yet still maintained the ability to promote vascular permeability.

[1449] To test whether this effect was dependent on cytokines released from the HUVECs, and in particular, IL-6, a human antiviral cytokine bead array analysis (BioLegend) was performed on HUVEC supernatants at 6 hours post-infection, in accordance with the manufacturer's instructions. HUVECs infected with the parental YS1646 strain exhibited very high IL-6 levels (1769.2 μg/mL), compared to the uninfected control (27.19 μg/mL). The YS1646Δasd/ΔFLG/ΔpagP strain induced lower levels of IL-6 (543.3 μg/mL), and the lowest amount of IL-6 was observed with the YS1646Δasd/ΔFLG/ΔpagP/ΔansB/ΔcsgD strain (272.8 μg/mL). Therefore, despite producing lower levels of pro-inflammatory cytokines that induce vascular leakage, the YS1646Δasd/ΔFLG/ΔpagP/ΔansB/ΔcsgD strain demonstrated higher levels of leakage than the YS1646Δasd/ΔFLG/ΔpagP strain. Thus, the ability to promote vascular leakage is an important feature for facilitating bacterial entry into the tumor vasculature, and for promoting greater tumor colonization. Strains described and provided herein possess this feature.

### Example 22

### STING Gain-Of-Function Variants Demonstrate Increased CXCL10 (IP-10) to IL-6 Ratios and Increased IFN-β to IL-6 Ratios in Primary Human M2 Macrophages

[1450] To determine the effects of various STING gain-of-function (GOF) mutants (including chimeric STING proteins with GOF mutations), on the downstream cytokine signaling in human M2 macrophages, the GOF mutants were cloned into the pATI-1.75 (also referred to as pATI1.75) vector, described in Example 8 above, which then was transfected into human M2 macrophages for expression, and the cell supernatants were assayed for secreted (expressed) cytokines.

[1451] Frozen human monocytes, isolated from healthy human donors, were thawed in complete medium (RPMI-1640+10% FBS), and washed by centrifugation for 10 minutes at 600× g, at room temperature. The monocytes were resuspended in ImmunoCult™-SF Macrophage Medium (StemCell Technologies) containing 100 ng/mL of human M-CSF+20 ng/mL of human IL-4+20 ng/mL of human IL-10. Monocytes (8e5 to 1e6 cells per well) were then seeded in a 24-well plate, with a final volume of 750 μL. Three days later, 750 μL of ImmunoCult™-SF Macrophage Medium (StemCell Technologies), containing 100 ng/mL human M-CSF+20 ng/mL human IL-4+20 ng/mL human IL-10, was added to each well, and the plate was incubated for four more days. On day seven, the cells were transfected using Viromer® RED mRNA and plasmid transfection reagent (Lipocalyx GmbH), according to the manufacturer's instructions. 500 ng of plasmid DNA from a panel of STING GOF mutants, as well as untransfected control, were diluted in the provided buffer, and mixed with the Viromer® RED transfection reagent, and incubated at room temperature for 15 minutes to allow the DNA/Viromer® RED complexes to form. The DNA/Viromer® RED complexes were then slowly added to each well of the 24-well plate (in triplicate), and the plate was incubated at 37° C. in a 5% CO₂ incubator. Supernatants were harvested after 48 hours of incubation, and were assayed for human CXCL10 (IP-10) and IL-6 using a flow cytometry-based human anti-viral cytokine bead array (BioLegend), according to the manufacturer's protocol. The average of three measurements was calculated, and the ratio of IP-10 to IL-6 was calculated by dividing the IP-10 concentration by the IL-6 concentration.

[1452] The results, which are summarized in the table below, show that the STING variant that resulted in the highest ratio of IP-10 to IL-6 was the huSTING N154S/R284G tazCTT variant (i.e., a chimeric STING protein, containing a modified human STING with a replacement of the CTT with the CTT of Tasmanian devil STING, and the GOF mutations N154S/R284G). The STING variant, containing a replacement of the CTT of human STING with the CTT of Tasmanian devil STING (huSTING tazCTT), displayed higher ratios of IP-10 to IL-6 than the corresponding fully human STING variants with the same mutations, thus, demonstrating an improved anti-tumor response.

Ratio of IP-10 to IL-6 Protein Expression Following Transfection of M2 Macrophages with plasmids Encoding STING Variants PGP-8

| | Mean Ratio of IP-10 | Standard |
|---|---|---|
| STING Variant | to IL-6 Expression | Deviation |
| Untransfected | 0.6108 | ±0.0960 |
| huSTING N154S | 3.174 | ±0.2006 |
| huSTING R284G | 3.938 | ±0.6123 |
| huSTING N154S/R284G | 3.832 | ±0.1185 |
| huSTING tazCTT N154S | 4.400 | ±0.1957 |
| huSTING tazCTT R284G | 4.497 | ±0.1631 |
| huSTING tazCTT N154S/ | 5.253 | ±0.1695 |
| R284G | | |

[1453] The ratio of IFN-β to IL-6 gene expression in human M2 macrophages, following the expression of various STING variants, was assessed. Frozen human monocytes, isolated from healthy human donors, were thawed in complete medium (RPMI-1640+10% FBS), and washed by centrifugation for 10 minutes at 600× g, at room temperature. The monocytes were resuspended in RPMI-1640+1× non-essential amino acids (NEAA)+5% human AB serum, containing 200 ng/mL human M-CSF+20 ng/mL human IL-4. Monocytes (8e5 to 1e6 cells per well) were then seeded in a 24-well plate, with a final volume of 750 μL. Three days later, 750 μL of RPMI with 5% human AB serum+NEAA, containing 200 ng/mL human M-CSF+20 ng/mL human IL-4, was added to each well, and the plate was incubated for four more days. On day seven, the cells were transfected using Viromer® RED transfection reagent, according to the manufacturer's instructions. 500 ng of plasmid DNA from a panel of STING GOF mutants, including the modified chimeric STING proteins, as well as untransfected control, were diluted in the provided buffer, and mixed with Viromer® RED transfection reagent, and incubated at room temperature for 15 minutes to allow the DNA/Viromer® RED complexes to form. As a positive control, the STING agonist 3′5′ RpRp c-di-AMP (InvivoGen), an analog of the clinical compound ADU-S100, was added to the cells at a concentration of 10 μg/mL. The DNA/Viromer® RED complexes then slowly were added to each well of the 24-well plate (in triplicate), and the plate was incubated for 48 hours at 37° C., in a CO₂ incubator.

[1454] The cells were harvested for qPCR 48 hours post-transfection, and were lysed with 350 μL Buffer RLT lysis buffer with beta-mercaptoethanol (Qiagen). RNA extraction was performed using the Qiagen RNeasy® Plus Mini Kit, with the following modifications. A genomic DNA elimination step, using an RNase-Free DNase kit (Qiagen), was included in the kit to remove genomic DNA from the total RNA. Total RNA concentration was measured using a NanoDrop™ One^{C} UV-Vis Spectrophotometer (Thermo Fisher Scientific). The purity of each sample also was assessed from the A₂₆₀/A₂₃₀ absorption ratio. RNA was stored at −80° C. without freeze-thawing, until reverse-transcription was performed. Synthesis of cDNA was performed from 0.5-1 μg of template RNA, using a CFX96™ Real-Time System (Bio-Rad) and iScript™ Reverse Transcription Supermix for RT-qPCR (Bio-Rad) in a 20 μL reaction, according to the manufacturer's instructions. qPCR was performed with a CFX96™ Real-Time System (Bio-Rad). Primers for human IFNβ1 (huIFNβ1; Assay ID: qHsaCEP0054112; Bio-Rad) and for huIL-6 (Assay ID: qHsaCEP0051939; Bio-Rad) were used for the qPCR. The qPCR reaction (20 μL) was conducted per protocol, using either the SsoAdvanced™ Universal SYBR® Green Supermix, or the iQ™ Multiplex Powermix (Bio-Rad). The standard thermocycling program on the Bio-Rad CFX96™ Real-Time System comprised a 95° C. denaturation step for 150 seconds, followed by 39 cycles of 95° C. for 15 seconds, and 60° C. for 55 seconds. Quantification of the target mRNA was normalized using actin reference mRNA (Bio-Rad, Assay ID: qHsaCEP0036280). ΔC_{q} was calculated as the difference between target (huIFNβ or huIL-6) and reference (actin) gene. ΔΔC_{q} was obtained by normalizing the ΔC_{q} values of the treatments (transfections), to the ΔC_{q} values of the non-treatment (i.e., untransfected) controls. The ratios of the IFNβ ΔΔC_{q} to the IL-6 ΔΔC_{q} are shown in the table below.

[1455] The results, which are summarized in the table below, show that, of all of the STING GOF mutants screened, the huSTING N154S/R284G tazCTT variant results in the highest ratio of immunostimulatory IFN-β to pro-inflammatory IL-6 expression. Additionally, the chimeric STING constructs, containing a replacement of the CTT of human STING with the CTT of Tasmanian devil STING (e.g., huSTING tazCTT), generally induced higher ratios of IFN-β to IL-6 expression than the corresponding fully human STING constructs comprising the same GOF mutation(s).

[1456] Increased expression of IFN-β indicates increased IRF3/type I IFN signaling, which is immunostimulatory and beneficial, while decreased IL-6 expression is indicative of reduced NF-κB signaling, which is pro-inflammatory and does not contribute to an anti-tumor response. A higher ratio of IFN-β to IL-6 expression is indicative of an increased anti-tumor/anti-viral type response, and a decreased pro-inflammatory response. Thus, replacement of the CTT, as well as the gain-of-function mutations, in a STING protein, increases the anti-tumor activity of the STING protein, and, hence, the immunostimulatory bacterium.

Ratio of IFN-β to IL-6 Gene Expression Following Transfection of M2 Macrophages with STING Variants

| | Mean Ratio of IFN-β to | Standard |
|---|---|---|
| STING Variant | IL-6 Gene Expression | Deviation |
| Untransfected control | 1.00 | 0.00 |
| STING Agonist (3′5′ | 4.00 | ±4.24 |
| RpRp c-di-AMP) | | |
| NanoLuc ® Plasmid Control | 16.00 | ±2.83 |
| huSTING WT | 33.00 | ±27.84 |
| huSTING VI47L | 7.00 | ±3.46 |
| huSTING N154S | 16.33 | ±11.24 |
| huSTING V155M | 14.00 | ±4.58 |
| huSTING C206Y | 19.00 | ±2.65 |
| huSTING R281Q | 21.33 | ±18.61 |
| huSTING R284S | 6.33 | ±4.93 |
| huSTING R284H | 6.33 | ±2.52 |
| huSTING R284M | 7.33 | ±0.58 |
| huSTING R284G | 9.67 | ±2.52 |
| huSTING V155M/C206Y | 10.67 | ±1.53 |
| huSTING N154S/C206Y | 11.00 | ±6.56 |
| huSTING C206Y/R284G | 11.00 | ±8.19 |
| huSTING V155M/R284G | 10.67 | ±4.93 |
| huSTING N154S/R284G | 48.00 | ±10.39 |
| huSTING WT tazCTT | 16.67 | ±10.41 |
| huSTING V147L tazCTT | 23.00 | ±1.00 |
| huSTING N154S tazCTT | 19.00 | ±6.08 |
| huSTING V155M tazCTT | 22.67 | ±4.16 |
| huSTING C206Y tazCTT | 14.67 | ±7.51 |
| huSTING R281Q tazCTT | 10.67 | ±3.51 |
| huSTING R284S tazCTT | 23.00 | ±8.89 |
| huSTING R284H tazCTT | 31.33 | ±13.43 |
| huSTING R284M tazCTT | 43.00 | ±14.93 |
| huSTING R284G tazCTT | 38.33 | ±12.01 |
| huSTING V155M/C206Y tazCTT | 31.00 | ±15.72 |
| huSTING N154S/C206Y tazCTT | 26.67 | ±11.59 |
| huSTING C206Y/R284G tazCTT | 40.67 | ±14.01 |
| huSTING V155M/R284G tazCTT | 31.33 | ±10.60 |
| huSTING N154S/R284G tazCTT | 108.33 | ±50.90 |

### Example 23

### Design of IL-15 Receptor-α and IL-15 Single-Chain Fusion Proteins

[1457] Fusion proteins, containing human proteins or mouse proteins, were prepared. The mouse proteins are for use in mouse models; the human proteins are for encoding in the immunostimulatory bacteria to be used as human therapeutics.

[1458] A human IL-15 Receptor-α (IL-15Rα) fused to a human IL-15 single-chain (sc) was designed, as follows. Amino acid residues 1-108 of human IL-15Rα (SEQ ID NO:401), which correspond to the leader sequence and sushi domain of IL-15-Ra (plus an additional 13 amino acid residues of IL-15Rα; see, e.g., Bouchaud et al. (2008) J Mol. Biol. 382(1):1-12) were added in-frame with a Gly-Ser linker that has four repeats of the sequence Gly-Gly-Gly-Gly-Ser (i.e., (GGGGS)₄). The polypeptide sequence corresponding to fully mature human IL-15sc, without the leader sequence or propeptide, and corresponding to amino acid residues 48-162 of SEQ ID NO:403, was added following the linker. The sequence of the resulting human IL-15Rα-IL-15sc fusion protein SE ID NO:404 is as follows:

MAPRRARGCRTLGLPALLLLLLLRPPATRGITCPPPMSVEHADIWVKSYS
LYSRERYICNSGFKRKAGTSSLTECVLNKATNVAHWTTPSLKCIRDPALV
HQRPAPPSGGGGSGGGGSGGGGSGGGGSANWVNVISDLKKIEDLIQSMHI
DATLYTESDVHPSCKVTAMKCFLLELQVISLESGDASIHDTVENLIILAN
NSLSSNGNVTESGCKECEELEEKNIKEFLQSFVHIVQMFINTS,

where the residues corresponding to residues 1-108 of human IL-15Rα are underlined; the Gly-Ser linker is in bold letters; and the residues corresponding to residues 48-162 of human IL-15 are double underlined.

[1459] Similarly, a murine IL-15Rα-IL-15sc fusion protein (SEQ ID NO:407) was prepared by fusion of a portion of the murine IL-15 Receptor-α (IL-15Rα) protein to a portion of the murine IL-15 single-chain (sc) protein. Amino acid residues 1-132 of murine IL-15Rα (SEQ ID NO:405), which include the leader sequence and sushi domain of IL-15-Ra, were added in-frame with a (GGGGS)₄ linker. The polypeptide sequence corresponding to fully mature murine IL-15sc, without the leader sequence or propeptide, and corresponding to amino acid residues 49-162 of SEQ ID NO:406, was added following the linker. The sequence of the resulting murine IL-15Rα-IL-15sc fusion protein (SEQ ID NO:407), which was used for mouse model experiments, is as follows:

MASPQLRGYGVQAIPVLLLLLLLLLLPLRVTPGTTCPPPVSIEHADIRVK
NYSVNSRERYVCNSGFKRKAGTSTLIECVINKNTNVAHWTTPSLKCIRDP
SLAHYSPVPTVVTPKVTSQPESPSPSAKEPEAGGGGSGGGGSGGGGSGGG
GSNWIDVRYDLEKIESLIQSIHIDTTLYTDSDFHPSCKVTAMNCFLLELQ
VILHEYSNMTLNETVRNVLYLANSTLSSNKNVAESGCKECEELEEKTFTE
FLQSFIRIVQMFINTS,

where the residues corresponding to residues 1-132 of murine IL-15Rα are underlined; the Gly-Ser linker is in bold letters; and the residues corresponding to residues 49-162 of murine IL-15 are double underlined.

### Example 24

### IL-15Rα-IL-15sc Induces Curative Effects and Protection from Tumor Re-Challenge in a Mouse Model of Colorectal Carcinoma

[1460] This example demonstrates that immunostimulatory bacteria that encode the IL-15Rα-IL15sc fusion protein (also referred to herein as IL-15/IL-15R alpha chain complex, IL-15/IL-15Rα chain complex, and IL-15/IL-15Rα) induce anti-tumor efficacy as a monotherapy. To demonstrate this, S. typhimurium strains, containing plasmids encoding murine IL-15Rα-IL15sc (muIL-15Rα-IL15sc), were prepared. The YS1646Δasd/ΔFLG/ΔpagP/ΔansB/ΔcsgD strain, containing the plasmid encoding muIL-15Rα-IL15sc (i.e., YS1646Δasd/ΔFLG/ΔpagP/ΔansB/ΔcsgD-muIL-15Rα-IL15sc; mouse IL-15Rα-IL15sc was used for the experiments performed in the mouse model), was compared to PBS control, for safety and efficacy in the subcutaneous (SC) flank MC38 colorectal adenocarcinoma model. For this study, 6-8 week-old female C57BL/6 mice (5 mice per group) were inoculated SC in the right flank with MC38 cells (5×10⁵ cells in 100 μL PBS). Mice bearing established flank tumors were intravenously (IV) injected on day 8 with 2×10⁷ CFUs of the YS1646Δasd/ΔFLG/ΔpagP/ΔansB/ΔcsgD-muIL-15Rα-IL15sc strain, or with PBS vehicle control. Tumor measurements and body weights were recorded twice weekly.

[1461] The results showed that the YS1646Δasd/ΔFLG/ΔpagP/ΔansB/ΔcsgD-muIL-15Rα-IL15sc strain demonstrated 50% cures (4/8 vs. 0/8 for PBS, p=0.005, day 21), after a single IV injection. At 66 days post-tumor implantation (day 57 post-IV dosing), cured mice (N=4) were re-implanted, on the opposite flank, with 5×10⁵ MC38 cells, and tumor growth was compared to naïve, age-matched mice (N=5). By day 30 post re-implantation, all mice in the group cured with strain YS1646Δasd/ΔFLG/ΔpagP/ΔansB/ΔcsgD-muIL-15Rα-IL15sc remained tumor-free, whereas all mice in the naïve group had reached maximum tumor volume. These data demonstrate the potent and curative effects of delivery of the IL-15Rα-IL15sc fusion protein via an immunostimulatory bacterium, such as strain YS1646Δasd/ΔFLG/ΔpagP/ΔansB/ΔcsgD-muIL-15Rα-IL15sc, and demonstrate the induction of durable protective immune memory in a model of colorectal carcinoma.

### Example 25

### Anti-CTLA-4 scFv-Fc Demonstrates Superior Blockade of the CD80/CTLA-4 and CD86/CTLA-4 Interactions Compared to Anti-CTLA-4 scFv

[1462] An scFv-Fc specific for human CTLA-4 (see, SEQ ID NOs:427 and 428 for the nucleic acid and protein sequences, respectively) was designed using the amino acid sequence of ipilimumab. Ipilimumab (YERVOY®) is a fully human IgG1× monoclonal antibody that specifically binds human CTLA-4 (see, e.g., the antibody designated 10D1 in U.S. Patent Publication No. 2002/0086014 and in U.S. Pat. No. 6,984,720), blocking CTLA-4's immune inhibiting interaction with CD80 (also known as B7.1 or B7-1) and CD86 (also known as B7.2 or B7-2).

[1463] To generate the ipilimumab scFv antibody fragment (see, SEQ ID NO:429), the variable light chain (V_{L}) and variable heavy chain (V_{H}) of ipilimumab were linked with a 20 amino acid long glycine-serine (GS) linker ((GGGGS)₄). To generate the scFv-Fc antibody fragment (see, SEQ ID NO:428), the variable heavy chain of the ipilimumab scFv was linked to a human IgG1 Fc, containing a mutation of the free cysteine in the hinge region to a serine (at position 272 in SEQ ID NO:428). The leader sequence (METPAQLLFLLLLWLPDTTG; corresponding to residues 1-20 in SEQ ID NO:428) was derived from the sequence of the human immunoglobulin kappa variable 3-20 (IGKV3-20) protein. The sequence was codon optimized using the GenScrip GenSmart™ Codon Optimization tool.

[1464] The neutralizing ability of the anti-CTLA-4 scFv-Fc was compared to that of the anti-CTLA-4 scFv (lacking the human IgG1 Fc portion), using competitive ELISAs to measure the ability of each of the antibody fragments to block the interactions between CTLA-4 and its ligands, CD80 and CD86. HEK293T cells were transfected with 3 micrograms of DNA encoding the anti-CTLA-4 scFv-Fc or the anti-CTLA-4 scFv antibody fragment constructs, using the FuGENE® transfection reagent (Promega), at the proper reagent:DNA ratios. Forty-eight hours post-transfection, HEK293T cell-free culture supernatants were harvested, filtered, and used in a competitive ELISA to assess the blockade activity of the anti-CTLA-4 antibody fragments.

[1465] For the competitive ELISAs, mouse CD80 or CD86 recombinant proteins (R&D Systems) were coated overnight at 4° C. on a high protein-binding 96-well plate, at a concentration of 100 ng/ml. The wells were then washed one time with PBS 0.05% Tween-20, and the wells were blocked with ELISA blocking buffer for 1 hour at room temperature. The wells were then washed one time with PBS 0.05% Tween-20. HEK293T cell culture supernatants, containing each of the anti-CTLA-4 antibody fragments, were mixed with 10 ng/ml of a recombinant murine CTLA-4-human IgG1 Fc chimera (R&D Systems), and added to the wells and incubated for 2 hours at room temperature. The wells were then washed three times with PBS 0.05% Tween-20, and horseradish peroxidase (HRP)-conjugated anti-human IgG1 antibody was added to the wells (Jackson ImmunoResearch), and incubated for one hour at room temperature. The wells were then washed three times with PBS 0.05% Tween-20, and detection reagent (3,3′,5,5′-tetramethylbenzidine (TMB), Thermo Fisher Scientific) was added to the wells. The enzymatic reaction was stopped with sulfuric acid (BioLegend), and the optical densities were read at 450 nm.

[1466] The results of the competitive ELISAs are summarized in the table below. The anti-CTLA-4 scFv-Fc blocked the binding of CTLA-4 to CD86 by 75.5%, and blocked the binding of CTLA-4 to CD80 by 40.6%, whereas the anti-CTLA-4 scFv blocked the binding of CTLA-4 to CD86 by 32.5%, and blocked the binding of CTLA-4 to CD80 by 7%. A higher degree of CD86/CTLA-4 blocking activity (compared with CD80/CTLA-4 blocking activity) was observed with both antibody fragments, and a superior neutralizing activity was observed with the anti-CTLA-4 scFv-Fc, when compared to the anti-CTLA-4 scFv.

### Competitive ELISA Results

| Anti-CTLA-4 Antibody | % CD86 | % CD80 |
|---|---|---|
| Fragment | Blockade Activity | Blockade Activity |
| Anti-CTLA-4 scFv | 32.5 | 7.0 |
| Anti-CTLA-4 scFv-Fc | 75.5 | 40.6 |

[1468] An anti-murine CTLA-4 scFv (SEQ ID NO:430) and anti-murine CTLA-4 scFv-Fc (SEQ ID NO:431), derived from the 9D9 clone, also were prepared, as discussed above for the corresponding human anti-CTLA-4 antibody fragments. The scFv contains an IgK leader mouse sequence, and the V_{L} and V_{H} domains from clone 9D9, linked via a (Gly₄Ser)₃ linker. The scFv-Fc also contains a mouse IgG2a Fc linked to the V_{H} domain.

[1469] Included among the immunostimulatory bacteria provided herein, are those that encode, on the plasmid, anti-CTLA-4 antibodies and fragments thereof, including the anti-CTLA-4 scFv antibody fragments and the anti-CTLA-4 scFv-Fc antibody fragments, as provided herein, as well as combinations with nucleic acid molecules encoding other therapeutic products.

### Example 26

### Optimized Expression Cassettes for High-Level, Multiplexed Expression of Encoded Therapeutic Products

[1470] Elements, known as Internal Ribosomal Entry Sites (IRES), can promote protein translation by enhancing ribosomal binding and stabilization of mRNA through mimicking the 5′mRNA cap. IRES elements from viruses and mammalian cells are well-known. Of these, an endogenous human IRES, known as Vascular Endothelial Growth Factor and Type 1 Collagen Inducible Protein (VCIP), previously was demonstrated to enhance expression from a bicistronic vector, encoding Firefly and Renilla luciferases, where the Renilla luciferase, which was the downstream gene (i.e., encoded after the VCIP IRES), was expressed in vitro and in vivo, without the need for a second promoter (see, e.g., Licursi et al. (2011) Gene Therapy 18(6):631-636).

[1471] Plasmids containing combinations of human or mouse IL-15Rα-IL-15sc and huSTING N154S/R284G tazCTT, or human or mouse IL-15Rα-IL-15sc, huSTING N154S/R284G tazCTT, and an anti-CTLA-4 scFv-Fc, where the bicistronic and polycistronic constructs contain 2A peptides, were tested for expression of each encoded payload/product against single expresser controls. Additionally, combination constructs, containing the VCIP IRES, also were tested.

[1472] HEK293T STING Null Cells (293-Dual™ Null Cells; InvivoGen) were used, which do not contain endogenous STING, and express secreted embryonic alkaline phosphatase (SEAP), placed under the control of the endogenous IFN-stimulated response element (ISRE) promoter, where the coding sequence of ISRE is replaced by the SEAP ORF using knock-in technology. STING activity can thus be assessed by monitoring type I IFN induced SEAP production. The 293-Dual™ Null cells also express Lucia™ luciferase, a secreted luciferase, placed under the control of the endogenous IFN-β promoter; the coding sequence of IFN-β has been replaced by the Lucia™ luciferase ORF using knock-in technology. This allows for the assessment of STING activity by monitoring the expression of IFN-β. Using these cells, STING activity can be assessed by monitoring ISRE-induced SEAP production and/or IFN-β-dependent expression of Lucia™ luciferase. The two reporter proteins, SEAP and Lucia™ Luciferase, can be measured in the cell supernatant using standard assays and detection reagents, such as the QUANTI-Blue™ and QUANTI-Luc™ detection reagents (InvivoGen), respectively.

[1473] The cells were seeded in 24-well plates coated with poly-L-lysine at 200,000 cells per well, and incubated overnight at 37° C. in a 5% CO₂ incubator, to achieve 80% confluency. The following day, 300 ng of each plasmid DNA, and 40 ng of a CMV-GFP vector (i.e., a vector encoding green fluorescent protein under the control of a CMV promoter), were diluted in serum-free media and added to FuGENE® transfection reagent (Promega), at the proper reagent:DNA ratios, with untransfected wells serving as negative controls (in duplicates). Cell culture supernatants from each sample were collected 48 hours post-transfection.

[1474] The STING activity of the huSTING N154S/R284G tazCTT variant was evaluated using the ISRE-SEAP and IFN-β-Lucia™ reporter systems. The type I interferon (IFN) activity (induced by STING) was assessed by monitoring type I IFN-stimulated SEAP production in the cell supernatants. 20 μL of cell culture supernatant was added to 180 μL of QUANTI-Blue™ reagent (InvivoGen), which is used for measuring SEAP. Type I interferon activation was determined by measuring ISRE-induced SEAP activity on a SpectraMax® M3 Spectrophotometer (Molecular Devices), at an absorbance wavelength of 650 nm. The type I interferon (IFN) activity (induced by STING) also was assessed by monitoring the type I IFN-stimulated Lucia™ luciferase production in the cell supernatants. 20 μL of cell culture supernatant was added to 50 μL of QUANTI-Luc™ reagent (InvivoGen), which is used for measuring Lucia™ luciferase activity. Type I interferon activation was determined by measuring IFNβ-induced Lucia™ luciferase activity on a SpectraMax® M3 Spectrophotometer (Molecular Devices), on the luminescence setting.

[1475] Cell culture supernatants also were assessed for the expression of human or mouse IL-15Rα-ILL-15sc (see, Example 23), and for the expression of human or mouse anti-CTLA-4 scFv-Fc (see, Example 25). For the muIL-15Rα-ILL-15sc constructs, the murine IL-15Rα-ILL-15sc ELISA (R&D) was used, per kit instructions. For the huIL-15Rα-IL-15sc constructs, the human IL-15Rα-IL-15sc ELISA (R&D) was used, per kit instructions. Direct ELISAs, with human and mouse CTLA-4-Fc (R&D Systems), were performed on the cell culture supernatants of cells transfected with plasmids encoding anti-human CTLA-4 scFv-Fc and anti-murine CTLA-4 scFv-Fc, to measure the expression levels of these proteins.

[1476] GFP production was detected by flow cytometry, and was used to normalize the transfections to each other. 48 hours post-transfection, the cells were washed twice with PBS+2% FBS by centrifugation at 1300 RPM for 3 minutes. The cells then were resuspended in PBS+2% FBS with DAPI (dead/live stain). Flow cytometry data were acquired using the ACEA NovoCyte® flow cytometer (ACEA Biosciences, Inc.), and analyzed using the FlowJo™ software (Tree Star, Inc.).

[1477] As shown in the table below, all constructs containing the huSTING N154S/R284G tazCTT variant displayed ISRE-SEAP reporter activity and IFNβ-Lucia™ luciferase reporter activity. The construct designated 2.1 CMV VCIP muIL-15Rα-IL-15sc T2A huSTING N154S/R284G tazCTT, which contains the VCIP IRES and a T2A peptide for expression of the combination of muIL-15Rα-IL-15sc and huSTING N154S/R284G tazCTT, results in the highest expression levels of muIL-15Rα-IL-15sc, when normalized by GFP co-transfection. Similarly, the construct designated 2.1 CMV VCIP huIL-15Rα-IL-15sc T2A huSTING N154S/R284G tazCTT, which contains the VCIP IRES and a T2A peptide for expression of the combination of huIL-15Rα-IL-15sc and huSTING N154S/R284G tazCTT, results in the highest expression levels of huIL-15Rα-IL-15sc, when normalized by GFP co-transfection. The construct designated 1.76 CMV mu anti-CTLA-4 scFv-Fc results in the highest level of expression of the murine anti-CTLA-4 scFv-Fc, and the construct designated 1.76 CMV hu anti-CTLA-4 scFv-Fc results in the highest level of expression of the human anti-CTLA-4 scFv-Fc, when normalized by GFP co-transfection.

Measurement of STING Activity, IL-15Rα-IL-15c Concentration, and Anti-CTLA-4 scFv-Fc Concentration, Normalized by GFP Co-Transfection, in HEK293T STING Null Cells

Mouse

| | | | | | muIL-15Rα- | | mu anti-CTLA-4 | |
|---|---|---|---|---|---|---|---|---|
| | ISRE-SEAP | | IFNβ-Lucia ™ | | IL-15sc | | scFv-Fc | |
| | (Abs) | | (RLUs) | | (Abs) | | (Abs) | |
| Construct | Mean | ±SD | Mean | ±SD | Mean | ±SD | Mean | ±SD |
| Untransfected | 0 | 0 | 0 | 0 | 0 | 0 | 0 | 0 |
| 1.76 CMV β- | −1.71E−05 | 1.04E−05 | −0.01597 | 0.6049 | 0 | 0 | 0.002325 | 0.0004565 |
| Actin | | | | | | | | |
| 1.76 CMV | 1.45E−07 | 4.79E−06 | 0.07555 | 0.3292 | 947.4 | 164.1 | NA* | NA* |
| muIL-15Rα- | | | | | | | | |
| IL-15sc | | | | | | | | |
| 1.76 CMV | 4.07E−02 | 4.29E−03 | 18.25 | 1.27 | NA | NA | NA* | NA* |
| huSTING | | | | | | | | |
| N154S/R284G | | | | | | | | |
| tazCTT | | | | | | | | |
| 1.76 CMV | 3.79E−02 | 2.19E−04 | 28.47 | 1.523 | 996.8 | 364.6 | NA* | NA* |
| muIL-15Rα- | | | | | | | | |
| IL-15sc T2A | | | | | | | | |
| huSTING | | | | | | | | |
| N154S/R284G | | | | | | | | |
| tazCTT | | | | | | | | |
| 2.1 CMV | 4.73E−02 | 7.60E−03 | 7.145 | 0.8812 | 1636 | 287.9 | NA* | NA* |
| VCIP muIL- | | | | | | | | |
| 15Rα-IL- | | | | | | | | |
| 15sc T2A | | | | | | | | |
| huSTING | | | | | | | | |
| N154S/R284G | | | | | | | | |
| tazCTT | | | | | | | | |
| 1.76 CMV mu | −1.54E−06 | 1.81E−05 | −0.6844 | 0.1614 | NA* | NA* | 0.03733 | 0.003862 |
| anti-CTLA-4 | | | | | | | | |
| scFv-Fc | | | | | | | | |
| 1.76 CMV mu | 3.51E−02 | 1.85E−04 | 3.225 | 0.2805 | 599.6 | 190.4 | 0.01676 | 0.00193 |
| anti-CTLA-4 | | | | | | | | |
| scFv-Fc T2A | | | | | | | | |
| muIL-15Rα- | | | | | | | | |
| IL-15sc P2A | | | | | | | | |
| huSTING | | | | | | | | |
| tazCTT | | | | | | | | |
| N154S/R284G | | | | | | | | |
| tazCTT | | | | | | | | |
| 2.1 CMV | 3.62E−02 | 1.26E−03 | 4.836 | 0.5915 | 610.1 | 230.7 | 0.01461 | 0.002674 |
| VCIP mu anti- | | | | | | | | |
| CTLA-4 scFv- | | | | | | | | |
| Fc T2A muIL- | | | | | | | | |
| 15Rα-IL-15sc | | | | | | | | |
| P2A | | | | | | | | |
| huSTING | | | | | | | | |
| N154S/R284G | | | | | | | | |
| tazCTT | | | | | | | | |

Human

| | | | | | huIL-15Rα- | | hu anti-CTLA-4 | |
|---|---|---|---|---|---|---|---|---|
| | ISRE-SEAP | | IFN β-Lucia ™ | | IL-15sc | | scFv-Fc | |
| | (Abs) | | (RLUs) | | (Abs) | | (Abs) | |
| Construct | Mean | ±SD | Mean | ±SD | Mean | ±SD | Mean | ±SD |
| Untransfected | 0 | 0 | 0 | 0 | 0 | 0 | 0 | 0 |
| 1.76 CMV β- | −1.71E−05 | 1.04E−05 | −0.01597 | 0.6049 | 0 | 0 | 0.001643 | 0.00007734 |
| Actin | | | | | | | | |
| 1.76 CMV | −1.18E−05 | 9.34E−06 | 0.03296 | 0.1661 | 2407 | 4.101 | NA* | NA* |
| huIL-15Rα- | | | | | | | | |
| IL-15sc | | | | | | | | |
| 1.76 CMV | 4.07E−02 | 4.29E−03 | 18.25 | ± 1.27 | NA* | NA* | NA* | NA* |
| huSTING | | | | | | | | |
| N154S/R284G | | | | | | | | |
| tazCTT | | | | | | | | |
| 1.76 CMV | 4.27E−02 | 3.76E−03 | 10.5 | 0.7221 | 1439 | 869.4 | NA* | NA* |
| huIL-15Rα- | | | | | | | | |
| IL-15sc T2A | | | | | | | | |
| huSTING | | | | | | | | |
| N154S/R284G | | | | | | | | |
| tazCTT | | | | | | | | |
| 2.1 CMV | 4.18E−02 | 4.63E−03 | 12.79 | 1.151 | 2758 | 235.1 | NA* | NA* |
| VCIP huIL- | | | | | | | | |
| 15Rα-IL-15sc | | | | | | | | |
| T2A | | | | | | | | |
| huSTING | | | | | | | | |
| N154S/R284G | | | | | | | | |
| tazCTT | | | | | | | | |
| 1.76 CMV hu | −8.73E−06 | 5.53E−06 | -0.333 | 0.04487 | NA* | NA* | 0.06436 | 0.006539 |
| anti-CTLA-4 | | | | | | | | |
| scFv-Fc | | | | | | | | |
| 1.76 CMV hu | 3.80E−02 | 1.32E−03 | 6.962 | 0.01366 | 2071 | 557.5 | 0.02265 | 0.001188 |
| anti-CTLA-4 | | | | | | | | |
| scFv-Fc T2A | | | | | | | | |
| huIL-15Rα- | | | | | | | | |
| IL-15sc P2A | | | | | | | | |
| huSTING | | | | | | | | |
| N154S/R284G | | | | | | | | |
| tazCTT | | | | | | | | |
| 2.1 CMV | 3.53E−02 | 3.25E−03 | 7.12 | 1.998 | 936.3 | 149.4 | 0.01687 | 0.0007017 |
| VCIP hu anti- | | | | | | | | |
| CTLA-4 scFv- | | | | | | | | |
| Fc T2A huIL- | | | | | | | | |
| 15Rα-IL-15sc | | | | | | | | |
| P2A huSTING | | | | | | | | |
| N154S/R284G | | | | | | | | |
| tazCTT | | | | | | | | |

SD = Standard deviation
*NA = Not applicable

### Example 27

### Expression Plasmids Encoding the Combination of huIL-15Rα-IL-15sc+huSTING N154S/R284G tazCTT

[1478] To identify the plasmid(s), with the highest expression of huIL-15Rα-ILL-15sc and huSTING N154S/R284G tazCTT, plasmids containing nucleic acid molecules encoding huIL-15Rα-IL-15sc and/or huSTING N154S/R284G tazCTT, with different 2A peptides (e.g., T2A or P2A), and/or different post-transcriptional regulatory elements (e.g., HPRE or WPRE), and/or different poly(A) tails (e.g., bovine growth hormone poly(A) (bGHpA) or simian virus 40 poly(A) (SV40pA)), and/or containing the VCIP IRES, were cloned. Additionally, in some constructs, short peptide spacers, including RRKR and RAKR, and other spacers of different lengths, were encoded following the nucleic acid encoding the first payload (i.e., huIL-15Rα-IL-15sc), and before the nucleic acid encoding the 2A peptide. RRKR and RAKR are designed furin protease cleavage sites, and were placed in that position to facilitate proper processing of the 2A peptide sequences. The plasmids were first evaluated for expression and functionality by transfection in HEK293T STING Null Cells (ISG/KI-IFN 3) cells (InvivoGen).

[1479] HEK293T STING Null Cells (293-Dual™ Null Cells (ISG-SEAP/KI-[IFN-β]Lucia; InvivoGen), which do not contain endogenous STING, and express secreted embryonic alkaline phosphatase (SEAP), placed under the control of the endogenous IFN-stimulated response element (ISRE) promoter, where the coding sequence of ISRE is replaced by the SEAP ORF using knock-in technology, were used. As discussed above, the 293-Dual™ Null cells also express Lucia™ luciferase, a secreted luciferase, placed under the control of the endogenous IFN-β promoter, where the coding sequence of IFN-β has been replaced by the Lucia™ luciferase ORF using knock-in technology. The cells were seeded in 24-well plates coated with poly-L-lysine, at 200,000 cells per well, and incubated overnight at 37° C. in a 5% CO₂ incubator, to achieve 80% confluency. The following day, 300 ng of each plasmid DNA, and 40 ng of a CMV-GFP vector, were diluted in serum-free media and added to FuGENE® transfection reagent (Promega), at the proper reagent:DNA ratios, with untransfected wells serving as negative controls (in duplicates). Cell culture supernatants from each sample were collected 48 hours post-transfection for analysis.

[1480] The STING activity of the huSTING N154S/R284G tazCTT modified STING protein was evaluated with the HEK293T STING Null (ISG-SEAP/KI-[IFN-β]Lucia) reporter cell line (InvivoGen). Using these cells, the type I interferon (IFN) activity (that is induced by STING) is assessed by monitoring type I IFN-stimulated Lucia™ luciferase production in the cell supernatants. IFNβ induction is measured with the IFNβ-Lucia reporter. 20 μL of cell culture supernatant was added to 50 μL of QUANTI-Luc™ reagent (InvivoGen), which is used for measuring Lucia™ luciferase activity. Type I interferon activation was determined by measuring IFNβ-induced Lucia™ luciferase activity on a SpectraMax® M3 Spectrophotometer (Molecular Devices), on the luminescence setting. Cell culture supernatants also were assessed for the expression of human IL-15Rα-IL-15sc by ELISA (R&D), per kit instructions.

[1481] GFP was detected by flow cytometry, and the expression levels of GFP (as measured by fluorescence) were used to normalize the transfections to one other. 48 hours post-transfection, the cells were washed twice with PBS+2% FBS by centrifugation at 1300 RPM for 3 minutes. The cells then were resuspended in PBS+2% FBS with DAPI (dead/live stain). Flow cytometry data were acquired using the ACEA NovoCyte® flow cytometer (ACEA Biosciences, Inc.), and analyzed using the FlowJo™ software (Tree Star, Inc.).

[1482] As shown in the two tables below, the plasmid construct designated 2.1 CMV VCIP huIL-15Rα-IL-15sc T2A huSTING N154S/R284G tazCTT HPRE bGHpA resulted in the highest normalized luminescence value from the IFNβ-Lucia™ reporter (see, first table below), and also, the highest normalized concentration of expressed huIL-15Rα-IL-15sc, as determined by ELISA (see, second table below).

[1483] As shown in the first table below, the construct encoding only huIL-15Rα-IL-15sc (and no STING variant), as expected, does not exhibit STING-induced type I IFN activity. The construct encoding only the huSTING N154S/R284G tazCTT exhibits a high level of STING-induced type I IFN activity. For the constructs encoding both payloads, the combination of a P2A peptide with WPRE results in higher levels of STING activity (i.e., higher levels of expression of STING), than combinations of T2A and P2A with HPRE, or T2A with WPRE. Additionally, higher levels of STING activity were observed with constructs containing a bGH poly(A) tail, than an SV40 poly(A) tail. The addition of a short peptide spacer, such as RAKR or RRKR, slightly increases the level of STING activity, compared to the same constructs not containing these spacers. In certain constructs, such as those designated 2.1 CMV VCIP huIL-15Rα-IL-15sc T2A huSTING N154S/R284G tazCTT HPRE bGHpA; 2.1 CMV VCIP huIL-15Rα-IL-15sc P2A huSTING N154S/R284G tazCTT HPRE bGHpA; 2.1 CMV VCIP huIL-15Rα-IL-15sc T2A huSTING N154S/R284G tazCTT WPRE bGHpA; 2.1 CMV VCIP huIL-15Rα-ILL-15sc T2A huSTING N154S/R284G tazCTT WPRE SV40pA; and 2.1 CMV VCIP huIL-15Rα-IL-15sc RAKR-T2A huSTING N154S/R284G tazCTT HPRE bGHpA, the addition of a VCIP IRES increases the levels of STING activity, compared to the same constructs not containing the VCIP IRES.

[1484] As shown in the second table below, the expression levels of huIL-15Rα-IL-15sc are higher from constructs containing a bGH poly(A) tail, than an SV40 poly(A) tail, and in general, constructs containing WPRE result in higher expression levels of huIL-15Rα-IL-15sc than the same constructs containing HPRE. The addition of an RAKR short peptide spacer, after the nucleic acid sequence encoding huIL-15Rα-IL-15sc, in the construct encoding CMV huIL-15Rα-IL-15sc T2A huSTING N154S/R284G tazCTT HPRE bGHpA, increased the expression levels of huIL-15Rα-IL-15sc. In all constructs, except the one designated 2.1 CMV VCIP huIL-15Rα-IL-15sc P2A huSTING N154S/R284G tazCTT HPRE SV40pA, the addition of a VCIP IRES (in addition to a 2A peptide) upstream of the construct, results in significantly increased expression of huIL-15Rα-ILL-15sc. Replacement of the 2A peptide with a VCIP IRES, for example, in the construct designated 1.76 CMV huIL-15Rα-ILL-15sc VCIP huSTING N154S/R284G tazCTT HPRE bGHpA, results in similar expression levels of huIL-15Rα-ILL-15sc. Replacement of the 2A peptide with a VCIP IRES, and the addition of a longer spacer between the nucleic acids encoding huIL-15Rα-IL-15sc and the VCIP IRES, for example, in the construct designated 1.76 CMV huIL-15Rα-IL-15sc Longer spacer VCIP huSTING N154S/R284G tazCTT HPRE bGHpA, results in a significantly increased expression level of huIL-15Rα-ILL-15sc. The spacer sequences in the constructs are nucleic acid sequences that are placed between the stop codon of the first ORF, and the VCIP IRES upstream of the second ORF. For example the spacer, designated “New spacer” in the tables below, has the sequence ACGTCTTCTCTTTTTAAAGGACCTCGTGAAATAAAAGTGC (SEQ ID NO:408), and the spacer, designated “Longer spacer” in the tables below, has the sequence

(SEQ ID NO: 409)
TCCGAGCCAAGTAAGGAGGTCCCTCTCTCTCTCTCCCCCCACGTCTTCTC
TTTTTAAAGGACCTCGTGAAATAAAAGTGC.

[1485] These results indicate that the addition of a VCIP IRES generally increases the expression levels of the first payload encoded on a bicistronic construct, and increases the expression levels of the second payload in certain constructs.

STING-Induced Type I IFN Activity, as Measured by Luminescence Levels from the IFNβ-˜Lucia™ Reporter, and Normalized by GFP Co-Transfection, in Transfected HEK293T STINK Null Cells

| | IFNβ-Lucia ™ | |
|---|---|---|
| | Reporter | |
| | Luminescence (RLUs) | |
| Construct | Mean | SD |
| Untransfected control | 0 | 0 |
| 1.76 CMV huIL-15Rα-IL-15sc HPRE bGHpA | -0.7073 | ±0.05241 |
| 1.76 CMV huSTING N154S/R284G tazCTT HPRE bGHpA | 7.455 | ±0.7934 |
| 1.76 CMV huIL-15Rα-IL-15sc T2A huSTING N154S/R284G | 3.293 | ±0.8576 |
| tazCTT HPRE bGHpA | | |
| 1.76 CMV huIL-15Rα-IL-15sc P2A huSTING N154S/R284G | 3.758 | ±0.1993 |
| tazCTT HPRE bGHpA | | |
| 1.76 CMV huIL-15Rα-IL-15sc T2A huSTING | 3.867 | ±1.297 |
| N154S/R284G tazCTT WPRE bGHpA | | |
| 1.76 CMV huIL-15Rα-IL-15sc P2A huSTING | 8.716 | ±0.4241 |
| N154S/R284G tazCTT WPRE bGHpA | | |
| 1.76 CMV huIL-15Rα-IL-15sc T2A huSTING | 0.9444 | ±0.03282 |
| N154S/R284G tazCTT HPRE SV40pA | | |
| 1.76 CMV huIL-15Rα-IL-15sc P2A huSTING | 0.4778 | ±0.03872 |
| N154S/R284G tazCTT HPRE SV40pA | | |
| 1.76 CMV huIL-15Rα-IL-15sc T2A huSTING | 0.4436 | ±0.1342 |
| N154S/R284G tazCTT WPRE SV40pA | | |
| 1.76 CMV huIL-15Rα-IL-15sc P2A huSTING | 0.483 | ±0.07984 |
| N154S/R284G tazCTT WPRE SV40pA | | |
| 1.76 CMV huIL-15Rα-IL-15sc RAKR-T2A huSTING | 3.621 | ±0.5816 |
| N154S/R284G tazCTT HPRE bGHpA | | |
| 1.76 CMV huIL-15Rα-IL-15sc RRKR-T2A huSTING | 4.938 | ±0.6406 |
| N154S/R284G tazCTT HPRE bGHpA | | |
| 2.1 CMV VCIP huIL-15Rα-IL-15sc T2A huSTING | 9.356 | ±2.116 |
| N154S/R284G tazCTT HPRE bGHpA | | |
| 2.1 CMV VCIP huIL-15Rα-IL-15sc P2A huSTING | 4.065 | ±0.02317 |
| N154S/R284G tazCTT HPRE bGHpA | | |
| 2.1 CMV VCIP huIL-15Rα-IL-15sc T2A huSTING | 4.648 | ±1.199 |
| N154S/R284G tazCTT WPRE bGHpA | | |
| 2.1 CMV VCIP huIL-15Rα-IL-15sc P2A huSTING | 4.666 | ±0.8666 |
| N154S/R284G tazCTT WPRE bGHpA | | |
| 2.1 CMV VCIP huIL-15Rα-IL-15sc T2A huSTING | -0.2763 | ±0.4616 |
| N154S/R284G tazCTT HPRE SV40pA | | |
| 2.1 CMV VCIP huIL-15Rα-IL-15sc P2A huSTING | 0.2751 | ±0.2559 |
| N154S/R284G tazCTT HPRE SV40pA | | |
| 2.1 CMV VCIP huIL-15Rα-IL-15sc T2A huSTING | 0.8467 | ±0.0387 |
| N154S/R284G tazCTT WPRE SV40pA | | |
| 2.1 CMV VCIP huIL-15Rα-IL-15sc P2A huSTING | 0.3058 | ±0.3335 |
| N154S/R284G tazCTT WPRE SV40pA | | |
| 2.1 CMV VCIP huIL-15Rα-IL-15sc RAKR-T2A huSTING | 7.278 | ±0.6898 |
| N154S/R284G tazCTT HPRE bGHpA | | |
| 2.1 CMV VCIP huIL-15Rα-IL-15sc RRKR-T2A huSTING | 2.675 | ±0.2714 |
| N154S/R284G tazCTT HPRE bGHpA | | |
| 1.76 CMV huIL-15Rα-IL-15sc VCIP huSTING N154S/R284G | 0.5301 | ±0.09792 |
| tazCTT HPRE bGHpA | | |
| 1.76 CMV huIL-15Rα-IL-15sc New spacer* VCIP huSTING | 0.869 | ±0.04427 |
| N154S/R284G tazCTT HPRE bGHpA | | |
| 1.76 CMV huIL-15Rα-IL-15sc Longer spacer** VCIP | 1.241 | ±0.03473 |
| huSTING N154S/R284G tazCTT HPRE bGHpA | | |

SD = Standard deviation
*New spacer = ACGTCTTCTCTTTTTAAAGGACCTCGTGAAATAAAAGTGC
**Longer spacer = TCCGAGCCAAGTAAGGAGGTCCCTCTCTCTCTCTCCCCCCACGTCTTCTCTTTTTAAAGGACCTCGTGAAATAAA
AGTGC

Concentration of Expressed huIL-15Rα-IL-15sc, as Measured by ELISA and Normalized by GFP Co-Transfection, in Transfected HEK293T STING Null Cells

| | Fluorescence (Abs) | |
|---|---|---|
| Construct | Mean | SD |
| Untransfected control | 0 | 0 |
| 1.76 CMV huIL-15Rα-IL-15sc HPRE bGHpA | 1619 | ±18.53 |
| 1.76 CMV huSTING N154S/R284G tazCTT HPRE bGHpA | 12.04 | ±35.09 |
| 1.76 CMV huIL-15Rα-IL-15sc T2A huSTING N154S/R284G | 1586 | ±88.91 |
| tazCTT HPRE bGHpA | | |
| 1.76 CMV huIL-15Rα-IL-15sc P2A huSTING N154S/R284G | 1906 | ±35.82 |
| tazCTT HPRE bGHpA | | |
| 1.76 CMV huIL-15Rα-IL-15sc T2A huSTING | 2244 | ±477 |
| N154S/R284G tazCTT WPRE bGHpA | | |
| 1.76 CMV huIL-15Rα-IL-15sc P2A huSTING | 2056 | ±71.49 |
| N154S/R284G tazCTT WPRE bGHpA | | |
| 1.76 CMV huIL-15Rα-IL-15sc T2A huSTING | 40.33 | ±9.336 |
| N154S/R284G tazCTT HPRE SV40pA | | |
| 1.76 CMV huIL-15Rα-IL-15sc P2A huSTING | 268.9 | ±10.53 |
| N154S/R284G tazCTT HPRE SV40pA | | |
| 1.76 CMV huIL-15Rα-IL-15sc T2A huSTING | 324.5 | ±51.87 |
| N154S/R284G tazCTT WPRE SV40pA | | |
| 1.76 CMV huIL-15Rα-IL-15sc P2A huSTING | 397.7 | ±42.62 |
| N154S/R284G tazCTT WPRE SV40pA | | |
| 1.76 CMV huIL-15Rα-IL-15sc RAKR-T2A huSTING tazCTT | 1915 | ±16.64 |
| N154S/R284G HPRE bGHpA | | |
| 1.76 CMV huIL-15Rα-IL-15sc RRKR-T2A huSTING | 1093 | ±3.221 |
| N154S/R284G tazCTT HPRE bGHpA | | |
| 2.1 CMV VCIP huIL-15Rα-IL-15sc T2A huSTING | 2758 | ±114.5 |
| N154S/R284G tazCTT HPRE bGHpA | | |
| 2.1 CMV VCIP huIL-15Rα-IL-15sc P2A huSTING | 2457 | ±1.527 |
| N154S/R284G tazCTT HPRE bGHpA | | |
| 2.1 CMV VCIP huIL-15Rα-IL-15sc T2A huSTING | 3616 | ±202.8 |
| N154S/R284G tazCTT WPRE bGHpA | | |
| 2.1 CMV VCIP huIL-15Rα-IL-15sc P2A huSTING tazCTT | 2327 | ±199 |
| N154S/R284G WPRE bGHpA | | |
| 2.1 CMV VCIP huIL-15Rα-IL-15sc T2A huSTING tazCTT | 397.5 | ±148.8 |
| N154S/R284G HPRE SV40pA | | |
| 2.1 CMV VCIP huIL-15Rα-IL-15sc P2A huSTING | 184.3 | ±39.19 |
| N154S/R284G tazCTT HPRE SV40pA | | |
| 2.1 CMV VCIP huIL-15Rα-IL-15sc T2A huSTING | 551 | ±15.35 |
| N154S/R284G tazCTT WPRE SV40pA | | |
| 2.1 CMV VCIP huIL-15Rα-IL-15sc P2A huSTING | 662.9 | ±99.41 |
| N154S/R284G tazCTT WPRE SV40pA | | |
| 2.1 CMV VCIP huIL-15Rα-IL-15sc RAKR-T2A huSTING | 2553 | ±71.83 |
| N154S/R284G tazCTT HPRE bGHpA | | |
| 2.1 CMV VCIP huIL-15Rα-IL-15sc RRKR-T2A huSTING | 1919 | ±332.6 |
| N154S/R284G tazCTT HPRE bGHpA | | |
| 1.76 CMV huIL-15Rα-IL-15sc VCIP huSTING N154S/R284G | 1507 | ±97.77 |
| tazCTT HPRE bGHpA | | |
| 1.76 CMV huIL-15Rα-IL-15sc New spacer* VCIP huSTING | 1385 | ±28.04 |
| N154S/R284G tazCTT HPRE bGHpA | | |
| 1.76 CMV huIL-15Rα-IL-15sc Longer spacer** VCIP huSTING | 2648 | ±178.2 |
| N154S/R284G tazCTT HPRE bGHpA | | |

*New spacer = ACGTCTTCTCTTTTTAAAGGACCTCGTGAAATAAAAGTGC
**Longer spacer = TCCGAGCCAAGTAAGGAGGTCCCTCTCTCTCTCTCCCCCCACGTCTTCTCTTTTTAAAGGACCTCGTGAAATAAAAGTGC

[1486] The differences in the downstream IFN-β signaling, induced in human M2 macrophages by the different huIL-15Rα-IL-15sc and huSTING N154S/R284G tazCTT constructs, was determined. Nucleic acids encoding huIL-15Rα-IL-15sc and huSTING N154S/R284G tazCTT were cloned into vectors, with and without a VCIP IRES, placed before the start codon of either the huIL-15Rα-IL-15sc or huSTING N154S/R284G tazCTT coding sequences.

[1487] Frozen human monocytes, isolated from healthy human donors, were thawed in complete medium (RPMI-1640+1000 FBS), and washed by centrifugation for 10 minutes at 600×g at room temperature. The monocytes were resuspended in ImmunoCult™-SF Macrophage Medium (StemCell Technologies), containing 100 ng/mL human M-CSF. The monocytes (5e5 cells per well) then were seeded in a 24-well plate with a final volume of 500 μL. Five days later, 250 μL of ImmunoCult™-SF Macrophage Medium (StemCell Technologies), containing 300 ng/mL human M-CSF+60 ng/mL human IL-4+60 ng/mL human IL-10, was added to each well, and the cells were incubated for 2 more days. On day 7, the cells were transfected using Viromer® RED mRNA and plasmid transfection reagent, according to the manufacturer's instructions. 750 ng of plasmid DNA, from a panel of different plasmid constructs, as well as a “no DNA” control (encoding secNanoLuc®), were diluted in the provided buffer, and mixed with Viromer® RED transfection reagent, and the mixture was incubated at room temperature for 15 minutes to allow the DNA/Viromer® RED complexes to form. The DNA/Viromer® RED complexes were then slowly added to each well of the 24-well plate (in triplicate), and the plate was incubated at 37° C. in a 5% CO₂ incubator. Cell culture supernatants were harvested at 48 hours, and were assayed for IFN-β using a human cytokine panel U-Plex assay (Meso Scale Discovery), according to the manufacturer's protocol. The average of three measurements was calculated, and background signal from the no DNA control was subtracted, to calculate the net IFN-β expression levels.

[1488] The results, which are summarized in the table below, show that the construct encoding only huIL-15Rα-ILL-15sc (and no STING), does not induce any IFN-β expression in transfected human M2 macrophages. The construct that results in the highest level of IFN-β expression in transfected human M2 macrophages is the construct designated pATI2.1 CMV VCIP huIL-15Rα-ILL-15sc T2A huSTING N154S/R284G tazCTT HPRE bGHpA. This construct (designated pATI2.1 CMV VCIP huIL-15Rα-ILL-15sc T2A huSTING N154S/R284G tazCTT HPRE bGHpA) results in a higher level of IFN-β expression than constructs with the pATI1.76 backbone, and with no VCIP IRES at all, or with a VCIP IRES between the ORFs of huIL-15Rα-IL-15sc and huSTING N154S/R284G tazCTT (i.e., where the VCIP IRES replaces a 2A sequence). The construct designated pATI2.1 CMV VCIP huIL-15Rα-IL-15sc T2A huSTING N154S/R284G tazCTT HPRE bGHpA results in a higher IFN-β signal, compared to the corresponding construct containing a P2A sequence instead of a T2A sequence. These results indicate that bicistronic constructs, containing a VCIP IRES upstream of the two ORFs, and a 2A sequence, particularly T2A, between the two ORFs, result in higher expression levels of the second encoded payload (in this case, a modified STING protein).

Net Signal of IFN-β Protein Expression Following Transfection of Human M2 Macrophages with Various Constructs

| | Net IFN-β | Standard |
|---|---|---|
| Construct | (pg/mL) | Deviation |
| pATI2.1 CMV VCIP secNanoLuc ® HPRE bGHpA | 0.00 | ±133.76 |
| pATI1.76 CMV huIL-15Rα-IL-15sc HPRE bGHpA | -411.92 | ±229.81 |
| pATI1.76 CMV huSTING N154S/R284G tazCTT HPRE | 2710.37 | ±579.12 |
| bGHpA | | |
| pATI1.76 CMV huIL-15Rα-IL-15sc T2A huSTING | -788.33 | ±139.87 |
| N154S/R284G tazCTT HPRE bGHpA | | |
| pATI2.1 CMV VCIP huIL-15Rα-IL-15sc T2A huSTING | 5505.08 | ±397.48 |
| N154S/R284G tazCTT HPRE bGHpA | | |
| pATI2.1 CMV VCIP huIL-15Rα-IL-15sc P2A huSTING | 1425.51 | ±62.06 |
| N154S/R284G tazCTT HPRE bGHpA | | |
| pATI1.76 CMV huIL-15Rα-IL-15sc VCIP huSTING | 1630.63 | ±709.30 |
| N154S/R284G tazCTT HPRE bGHpA | | |
| pATI1.76 CMV huIL-15Rα-IL-15sc New spacer* | 2014.95 | ±97.68 |
| VCIP huSTING tazCTT N154S/R284G HPRE bGHpA | | |
| pATI1.76 CMV huIL-15Rα-IL-15sc Longer spacer** VCIP | 385.71 | ±158.29 |
| huSTING N154S/R284G tazCTT HPRE bGHpA | | |

*New spacer = ACGTCTTCTCTTTTTAAAGGACCTCGTGAAATAAAAGTGC
**Longer spacer = TCCGAGCCAAGTAAGGAGGTCCCTCTCTCTCTCTCCCCCCACGTCTTCTCTTTTTAAAGGACCTCGTGAAATAA
AAGTGC

### Example 28

### Expression of Phospholipase D as a Method to Improve Plasmid Delivery

[1489] As part of its pathogenesis, Salmonella enterica serovar Typhimurium is phagocytized by myeloid cells, and activates a virulence program to alter phagosomes into Salmonella-containing vacuoles (SCVs). While ectopic expression of genes encoded on the plasmid requires plasmid translocation from the SCV to the nucleus, the mechanism of this translocation event is unknown. This example provides an engineering approach to improve plasmid transfer from the engineered immunostimulatory bacteria.

[1490] Rickettsia prowazekii is a Gram-negative intracellular pathogen that must escape the phagosomal compartment in order to access the host cytosol and replicate. Previous work has shown that the secreted R. prowazekii virulence factor, Phospholipase D (Pld), can be cloned into S. enterica to facilitate escape from the SCV (see, e.g., Whitworth et al. (2005) Infection and Immunity 73(10):6668-6673). The pld gene (SEQ ID NO:432), encoding Pld (SEQ ID NO:433), was placed under the control of the ssaG promoter, which is induced in the SCV (see, e.g., Walthers et al. (2007) Molecular Microbiology 65(2):477-493), to ensure high expression after the bacteria is delivered into phagocytic cells. This bacterial expression cassette was cloned into the backbone of two NanoLuciferase® reporter plasmids, designated CMV-NanoLuc® and EF1α-NanoLuc®, and plasmid delivery was assessed in human macrophages.

[1491] To measure plasmid delivery into infected cells, primary human monocytes were differentiated in ImmunoCult™-SF Macrophage Medium (StemCell Technologies), containing 100 ng/ml GM-CSF, for 5 days. On day 6, the cells were supplemented with additional media containing 150 ng/ml GM-CSF and 60 ng/ml huIL-4 for 48 hours. The cells were then bactofected with stationary phase strains of YS1646Δasd/ΔFLG/ΔpagP/ΔansB/ΔcsgD bacteria, comprising one of the CMV-NanoLuc®, CMV-NanoLuc®+pld, EF1α-NanoLuc®, or EF1α-NanoLuc®+pld plasmids. The bacterial strains were grown overnight at 37° C. in 4×YT medium, at an MOI (multiplicity of infection) of 100. Infected cells were centrifuged for 5 minutes at 500 rcf, and then incubated at 37° C. for 1 hour, after which the cells were washed thrice with DPBS, and incubated in fresh ImmunoCult™-SF Macrophage Medium, containing 100 μg/ml gentamicin to eliminate any extracellular bacteria. At 24 and 48 hours post-infection, the cell supernatants were harvested, and the NanoLuciferase® luciferase contents were measured using a luciferase assay (Promega). The cells also were lysed with 0.1% Triton X in PBS and plated, to enumerate the number of colony forming units (CFUs) that remained inside the cells.

[1492] The results, which are summarized in the table below, show that, when placed under the control of the CMV promoter, the levels of NanoLuciferase® expressed from the pld-encoding group (i.e., the CMV-NanoLuc® luciferase+pld plasmids) were greater than the levels of NanoLuciferase® expressed from the CMV-NanoLuc® luciferase plasmid alone, at 24 hours post-infection; this difference grew in magnitude at 48 hours post-infection.

[1493] Bactofection of cells with engineered immunostimulatory bacteria encoding pld also resulted in higher luminescence levels than corresponding infections without pld, when the NanoLuc® was placed under the control of the EF-1α promoter. This effect was lower than what was observed in the groups with the CMV promoter, indicating that some pld expression is enhanced by leakiness from the CMV promoter.

Comparison of Luciferase Expression Levels in Cell Supernatants of Human Macrophages Infected with Bacterial Strains Containing Plasmids Encoding Pld, Vs. Those not Encoding Pld

| Plasmid | Average | | Average | | Average | |
|---|---|---|---|---|---|---|
| Delivered | Luminescence | SD | Luminescence | SD | Luminesence | SD |
| by the | t = 0 | t = 0 | 24 hpi | 24 hpi | 48 hpi | 48 hpi |
| Bacteria | (RLUs) | (RLUs) | (RLUs) | (RLUs) | (RLUs) | (RLUs) |
| Uninfected | 122.9 | ±47.7 | 177.9 | ±25.8 | 157.6 | ±18.2 |
| CMV- | 2057.0 | ±517.2 | 2291.2 | ±233.9 | 3443.9 | ±124.4 |
| NanoLuc ® | | | | | | |
| CMV- | 1412.6 | ±73.6 | 8155.0 | ±2156.2 | 12054.8 | ±3112.9 |
| NanoLuc ® + | | | | | | |
| pld | | | | | | |
| EF1α- | 154.6 | ±20.8 | 148.6 | ±24.3 | 132.5 | ±5.2 |
| NanoLucR | | | | | | |
| EF1α- | 165.6 | ±7.5 | 223.4 | ±18.3 | 256.0 | ±24.7 |
| NanoLuc ® + | | | | | | |
| pld | | | | | | |

hpi = hours post-infection;
SD = standard deviation;
RLUs = relative light units.

[1494] The results also showed that the number of CFUs of the CMV-NanoLuc®+pld-encoding strain, that remained inside the cells at 24 and 48 hours post-infection (hpi), decreased at a greater rate than the number of CFUs of bacteria harboring the CMV-NanoLuc® luciferase plasmid alone, indicating a different fate for each strain within the same cells.

### CFUs Remaining Inside the Cells at Different Time Points

| | CFUs, | CFUs, | CFUs, |
|---|---|---|---|
| | 0 Hours | 24 Hours | 48 Hours |
| | Post- | Post- | Post- |
| Strain | Infection | Infection | Infection |
| CMV-NanoLuc ® | 5.4 × 10⁷ | 1.5 × 10⁵ | 4.2 × 10³ |
| CMV-NanoLuc ® + pld | 8.0 × 10⁷ | 1.6 × 10⁴ | 6.4 × 10² |
| EF1α-NanoLuc ® | 7.8 × 10⁷ | 5.5 × 10⁴ | 2.5 × 10³ |
| EF1α-NanoLuc ® + | 6.8 × 10⁷ | 2.6 × 10⁵ | 2.3 × 10³ |
| pld | | | |

[1496] To determine if encoding Phospholipase D in the bacterial plasmid enhances the delivery of immunomodulatory payloads encoded on the same plasmid, RAW-Dual™ TLR4-KO cells (which express STING; InvivoGen) were infected with bacterial strains containing plasmids with and without nucleic acid encoding pld. RAW-Dual™ TLR4-KO cells encode a Lucia™ luciferase reporter under the control of an Interferon-Stimulated Response Element (ISRE). The cells were cultured in DMEM+10% FBS, seeded into wells, and allowed to adhere overnight. Bactofections were performed as described above, using strains of YS1646Δasd/ΔFLG/ΔpagP/ΔansB/ΔcsgD, containing plasmids encoding huIL-15Rα-IL-15sc and huSTING N154S/R284G tazCTT, with or without nucleic acid encoding pld under control of the ssaG promoter. Uninfected cells, and uninfected cells treated with 5 μg/ml of the STING agonist 3′5′ RpRp c-di-AMP, were used as negative and positive controls, respectively. At 48 hours post-infection, the cell supernatants were harvested, and the levels of expressed Lucia™ luciferase were measured using a luciferase assay (Promega).

[1497] The results, which are shown in the table below, show that, when pld was expressed during infection, from a plasmid also encoding human IL-15Rα-ILL-15sc and the STING mutant polypeptide, the ISRE activity (as measured by Lucia™ luciferase expression) was higher than in the absence of pld expression. The ISRE activity is a measure of the STING-induced type I IFN activity, and thus, is indicative of the delivery of the plasmids encoding the STING variant, and of expression of the STING variant in the cells. Expression of phospholipase D (pld), thus, enhances the delivery of plasmids that also encode immunomodulatory payloads.

### Effects of pld Expression on the Delivery of Plasmids Encoding Immunomodulatory Payload Combinations by Immunostimulatory Bacteria

| | Average | |
|---|---|---|
| | Luminescence | |
| Plasmid Construct | (RLUs) | STDEV |
| Uninfected cells | 63.6 | ±12.1 |
| Uninfected cells + 5 μg/ml 3′5′ RpRp | 1052.6 | ±32.3 |
| c-di-AMP | | |
| VCIP huIL-15Rα-IL-15sc T2A huSTING | 80.5 | ±20.9 |
| N154S/R284G tazCTT | | |
| VCIP huIL-15Rα-IL-15sc T2A huSTING | 108.3 | ±4.5 |
| N154S/R284G tazCTT (P-ssaG-pld) | | |

STDEV = standard deviation

### Example 29

### The Combination of Murine IL-15Rα-IL-15sc and huSTING N154S/R284G tazCTT, and the Combination Thereof with Murine Anti-CTLA-4 scFv-Fc, Induces the Secretion of CXCL10 from Myeloid Cells and Induces the Activation of T-Cells

[1499] The impact of the expression of the immunomodulatory payloads, and their combinations, on the activation and function of T-cells and myeloid cells, was evaluated. This example describes and demonstrates the impact of the delivery of various immunomodulatory payload combinations, by the immunostimulatory bacteria provided herein, on the activation of antigen-specific T-cells (in terms of CD25 expression and IFN-7 secretion), and on the secretion of CXCL10, a key chemokine involved in the recruitment of anti-tumor T-cells, by myeloid cells. The levels of secreted cytokines, such as IFN-γ, IFN-β, and CXCL10 (IP-10), were measured as correlates of protective anti-tumor immunity, and CD25 cell surface expression was monitored as a marker of T-cell activation. This was assessed by transfecting mouse bone-marrow derived dendritic cells (BMDCs) with plasmids encoding various combinations of payloads, co-culturing the transfected dendritic cells with autologous mouse T-cells, and then identifying the resulting cytokines.

[1500] The plasmids encoding the immunomodulatory payloads/proteins included those encoding single payloads, as well as those encoding combinations of payloads. For example, as shown in the table below, encoded payloads included murine (mu) IL-15Rα-ILL-15sc (also referred to as IL-15/IL-15Rα complex, as IL-15/IL-15Rα chain complex, IL-15/IL-15R alpha chain complex, IL-15 complex, and IL-15cplex); a murine anti-CTLA-4 scFv-Fc (clone 9D9); and huSTING N154S/R284G tazCTT (a chimeric protein containing human STING with the GOF mutations N154S and R284G, and a replacement of the C-terminal tail (CTT) of human STING with the CTT of Tasmanian devil STING); and combinations thereof.

[1501] Combinations of payloads included two or three payloads, expressed on a single plasmid using T2A and/or P2A peptides, such that the proteins are encoded under the control of the same promoter. The combinations of payloads included: 1) murine IL-15Rα-ILL-15sc and human STING N154S/R284G tazCTT; and 2) murine anti-CTLA-4 scFv-Fc, murine IL-15Rα-IL-15sc, and human STING N154S/R284G tazCTT.

[1502] Bone marrow-derived dendritic cells (BMDCs) were differentiated from Goldenticket mice, which are STING deficient, and the cells were transfected with plasmids encoding various combinations of the investigated payloads. Twenty-four hours post-transfection, cell supernatants were harvested, and the levels of secreted CXCL10 were measured in BMDC culture supernatants, using a U-Plex assay platform from Meso Scale Discovery, according to the manufacturer's protocol.

[1503] To measure CD8⁺ T-cell activation, transfected BMDCs were pulsed with chicken ovalbumin (OVA) SIINFEKL (OVA₂₅₇₋₂₆₄) peptide, a major histocompatibility complex (MHC) class I (H-2Kb)-restricted peptide epitope recognized by CD8⁺ T-cells. Splenic T-cells, isolated from Rag1^{-/-} OT-I mice, which express T-cell receptors (TCRs) that are specific for SIINFEKL presented by the MHC class I molecule H-2Kb, were added to the BMDCs for co-culture. After 24 hours of BMDC/T-cell co-culture, supernatants were harvested, and the levels of secreted IFN-γ were measured using a U-Plex assay platform from Meso Scale Discovery, according to the manufacturer's protocol.

[1504] The co-cultured cells also were harvested, and CD8⁺ T-cells were stained with a phycoerythrin (PE)-conjugated murine anti-CD25 antibody (clone PC61, BioLegend), to determine the expression levels of the CD25 T-cell activation marker.

[1505] The results are summarized in the table below, which shows the levels of CXCL10 secreted by BMDCs in response to transfection with plasmids encoding various single and combination payloads, as well as the levels of IFN-7 secreted by CD8⁺ T-cells, and the levels of T-cell activation (in terms of CD25 expression), following co-culture with the transfected BMDCs.

[1506] The results show that huSTING N154S/R284G tazCTT alone induces very high levels of CXCL10 secretion by BMDCs. Combinations of murine IL-15Rα-IL-15sc with huSTING N154S/R284G tazCTT, or of murine anti-CTLA-4 scFv-Fc+murine IL-15Rα-ILL-15sc+huSTING N154S/R284G tazCTT, also induce high levels of CXCL10 secretion by BMDCs.

[1507] The results also show exemplary combinations of encoded payloads that induce high levels of secretion of IFN-7 by human T-cells, and induce the activation (CD25 expression) of T-cells. An increased effect was observed with the combination of muIL-15Rα-IL-15sc and huSTING N154S/R284G tazCTT. The combination of muIL-15Rα-IL-15sc and huSTING N154S/R284G tazCTT also results in increased activation of CD8⁺ T-cell responses, and the expression of CD25. These results indicate that the delivery of the combination of IL-15Rα-IL-15sc and the modified STING chimera with a gain-of-function mutation or mutations and with a CTT replacement to reduce NF-κB signaling, to the tumor microenvironment, increases advantageous anti-tumor immune responses, and reduces undesirable inflammatory responses.

| | CXCL10 | | IFN-γ | | | |
|---|---|---|---|---|---|---|
| | Secreted by | | Secreted by | | % CD25 | |
| | BMDCs | | CD8⁺ T-Cells | | Expression on | |
| BMDC Treatments | (pg/ml) | | (pg/ml) | | CD8⁺ T-Cells | |
| (Transfections) | Mean | SEM | Mean | SEM | Mean | SEM |
| Untransfected control | 11 | 0 | 1102 | 70 | 17 | 3 |
| Beta-actin (plasmid control) | 159 | 18 | 1391 | 27 | 26 | 1 |
| muIL-15Rα-IL-15sc | 286 | 43 | 1705 | 139 | 43 | 1 |
| muAnti-CTLA-4 scFv-Fc | 627 | 9 | 2182 | 87 | 41 | 7 |
| huSTING N154S/R284G tazCTT | 3612 | 62 | 2731 | 121 | 54 | 1 |
| muIL-15Rα-IL-15sc + | 2340 | 190 | 2973 | 246 | 70 | 21 |
| huSTING N154S/R284G tazCTT | | | | | | |
| muAnti-CTLA-4 scFv-Fc + | 1860 | 96 | 3098 | 165 | 51 | 2 |
| muIL-15Rα-IL-15sc + | | | | | | |
| huSTING N154S/R284G tazCTT | | | | | | |

SEM = Standard Error of the Mean

[1508] Delivery of this combination of encoded payloads, by the immunostimulatory bacteria provided herein, or by other delivery vehicles, such as oncolytic viruses or vectors, for expression of the payloads in tumor-resident myeloid cells and/or in the tumor microenvironment, provides for increased anti-tumor responses in the treated subject. As also shown in Examples below, the combination of a cytokine and a modified STING protein with a gain-of-function mutation, including the chimeras, results in additional advantageous anti-tumor responses in a treated subject.

### Example 30

### Human Recombinant IL-15, in Combination with a Small Molecule STING Agonist, Induces the Secretion of CXCL10 from Myeloid Cells, and Induces the Activation of T-Cells

[1509] This Example shows the impact of the expression of human immunomodulatory payloads, and their combinations, on the activation and function of T-cells and myeloid cells. The levels of secreted cytokines, such as IFN-7 and CXCL10 (IP-10), were measured as indicators of protective anti-tumor immunity. This Example describes and demonstrates the impact of the recombinant monomeric human IL-15 cytokine and 2′3′-c-di-AM(PS)2 (Rp, Rp), a small molecule STING (smSTING) agonist, on the secretion of CXCL10 by myeloid cells, a chemokine that is involved in the recruitment of anti-tumor T-cells, and on the secretion of IFN-7 by antigen-specific T-cells. The smSTING agonist is a cyclic dinucleotide (CDN) known to induce the production of type I interferons (IFNs) following its recognition by endoplasmic reticulum-resident STING. 2′3′-c-di-AM(PS)2 (Rp, Rp) is the Rp, Rp-isomer of the 2′3′-bisphosphorothioate analog of 3′3′-cyclic adenosine monophosphate (c-di-AMP). It has a higher affinity for STING than c-di-AMP, due to the presence of a 2′-5′, 3′-5′ mixed linkage. This analog contains two phosphorothioate diester linkages to protect it against degradation by phosphodiesterases that are present in host cells or in the systemic circulation. 2′3′-c-di-AM(PS)2 (Rp, Rp) strongly induces type I IFN and CXCL10 production in relevant cells.

[1510] Human monocyte-derived dendritic cells (ModDCs) and autologous human T-cells were co-cultured with the small molecule (smSTING) agonist and the recombinant IL-15, and the resulting secreted cytokines were identified. The human monocyte-derived dendritic cells (ModDCs) were differentiated from negatively isolated monocytes, using the ImmunoCult™ Dendritic Cell Culture Kit (STEMCELL Technologies), for 6 days, following the manufacturer's instructions. After 6 days of differentiation, ModDCs were pulsed with a pool of 32 MHC class I-restricted viral peptides from human cytomegalovirus (CMV), Epstein-Barr virus (EBV), and influenza virus (Flu) (extended CEF peptide pool for human CD8 T cells, MABTECH), before the addition of autologous CD8⁺ T-cells, and treatment with 2.5 nM of recombinant human IL-15 and/or 5 μg/ml of smSTING. Pulsing the dendritic cells with the viral peptides causes the dendritic cells to present the viral antigens on their cell surfaces, and stimulates antigen-specific T-cells to produce IFN-gamma. After 48 hours of ModDC/T-cell co-culture, the levels of secreted IFN-7 and CXCL10 were measured in the cell culture supernatants, using a U-Plex assay platform from Meso Scale Discovery, according to the manufacturer's protocol.

[1511] The results, which are summarized in the table below, show the additive effect of STING activation and human IL-15 activity on the secretion of CXCL10 by human dendritic cells upon antigen-specific stimulation. The results also show that the combination of STING activation and a cytokine, such as human IL-15, synergistically activates antigen-specific CD8⁺ T-cells, and induces high levels of IFN-7 secretion by the activated CD8⁺ T-cells.

| | CXCL10 Secreted by | | IFN-γ Secreted by | |
|---|---|---|---|---|
| | ModDCs (pg/ml) | | CD8⁺ T-Cells (pg/ml) | |
| Treatments | Mean | SEM | Mean | SEM |
| Media (control) | 21337 | 1015 | 685 | 40 |
| smSTING (CDN) | 78407 | 3869 | 5185 | 654 |
| Recombinant human | 38671 | 1052 | 35311 | 29713 |
| IL-15 | | | | |
| Recombinant human | 100673 | 3229 | 268328 | 17505 |
| IL-15 + smSTING | | | | |
| (CDN) | | | | |

SEM = Standard Error of the Mean

### Example 31

### Combinations of Gain-of-Function STING Variants and Cytokines Enhance the Anti-Tumor Immune Response

[1512] The Combination of Human IL-15Rα-IL-15sc and huSTING N154S/R284G tazCTT Induces the Secretion of IFN-β from Myeloid Cells, and Induces the Activation of T-Cells

[1513] This Example demonstrates the impact of the encoded human immunomodulatory payloads, and their combinations, that are delivered for expression in the TME and/or in tumor-resident myeloid cells, on the activation and function of human T-cells and dendritic cells. The levels of cytokines secreted by the dendritic cells and the T-cells, such as IFN-7 and IFN-β, respectively, were measured as correlates of protective anti-tumor immunity. This example describes and demonstrates the impact of the delivery of various immunomodulatory payload combinations to the tumor microenvironment, such as by the immunostimulatory bacteria exemplified herein, and/or by other delivery vehicles described herein, on the activation of antigen-specific T-cells (as demonstrated by IFN-7 secretion), and on the secretion of IFN-β, a key factor involved in the anti-tumor immune response. This was achieved by transfecting human monocyte-derived dendritic cells (ModDCs) with plasmids encoding various combinations of payloads, co-culturing the transfected dendritic cells with autologous human T-cells, and identifying the cytokines secreted as a result. The plasmids encoding the immunomodulatory payloads/proteins included those encoding single payloads, and those encoding combinations of payloads. For example, as shown in the table below, the encoded payloads included huIL-15Rα-IL-15sc alone, huSTING N154S/R284G tazCTT alone, and the combination of huIL-15Rα-IL-15sc and huSTING N154S/R284G tazCTT.

[1514] Human monocyte-derived dendritic cells (ModDCs) were differentiated from negatively isolated monocytes using the ImmunoCult™ Dendritic Cell Culture Kit (STEMCELL Technologies) for 6 days, following the manufacturer's instructions. After 6 days of differentiation, ModDCs were transfected with plasmids encoding the various investigated payloads and combinations thereof, using the Viromer® RED mRNA and plasmid DNA transfection reagent (Origene). Four hours post-transfection, the ModDCs were pulsed with a pool of 32 MHC class I-restricted viral peptides from human cytomegalovirus (CMV), Epstein-Barr virus (EBV), and influenza virus (Flu) (extended CEF peptide pool for human CD8 T cells, MABTECH), before the addition of autologous CD8⁺ T-cells to the cell culture. The transfected dendritic cells also were pulsed with an irrelevant peptide from the Human Immunodeficiency virus 1 (HIV-1) reverse transcriptase, and used as a negative control for the peptide stimulation of T-cells. CD8⁺ T-cells from HIV-1 negative donors were used. After 48 hours of ModDC/T-cell co-culture, the levels of IFN-7 secreted by the T-cells were measured in the cell culture supernatants, using a U-Plex assay platform from Meso Scale Discovery, according to the manufacturer's protocol.

[1515] In a separate experiment, ModDCs were transfected with plasmids encoding the various investigated payloads and combinations thereof, using the Viromer® RED mRNA and plasmid DNA transfection reagent (Origene), and cultured for forty-eight hours. Cell culture supernatants from the transfected ModDCs were harvested forty-eight hours post-transfection, and the levels of secreted IFN-β were measured using a U-Plex assay platform from Meso Scale Discovery, according to the manufacturer's protocol. In order to analyze the impact of the encoded payloads on the secretion of IFN-β by the human dendritic cells, the concentration of IFN-β measured for the plasmid control group (Beta-actin) was subtracted from all the other groups in the study, providing the net IFN-β concentrations resulting only from the activities of the encoded payloads.

[1516] The results, which are summarized in the table below, show the synergistic effect of the combination of huIL-15Rα-IL-15sc and huSTING N154S/R284G tazCTT activities on the secretion of IFN-β by human dendritic cells. The results also show the combined effects of huIL-15Rα-IL-15sc and huSTING N154S/R284G tazCTT, which are at least additive, on the activation of antigen-specific CD8⁺ T-cells, and the induction of high levels of secreted IFN-7 from the activated T-cells.

| | Net IFN-β | IFN-γ Secreted by | | | |
|---|---|---|---|---|---|
| | Secreted | CD8⁺ T-Cells (pg/ml) | | | |
| | by ModDCs | HIV | | CEF | |
| ModDC Treatments | (pg/ml) | Peptides | | Peptides | |
| (Transfections) | Mean | Mean | SEM | Mean | SEM |
| Untransfected control | 0 | 205 | 62 | 1661 | 169 |
| Beta-actin (plasmid | 0 | 7639 | 2422 | 18252 | 619 |
| control) | | | | | |
| huSTING N154S/R284G | 647 | 11746 | 825 | 31452 | 3280 |
| tazCTT | | | | | |
| huIL-15Rγ-IL-15sc | 226 | 10670 | 2397 | 39245 | 6439 |
| huIL-15Rγ-IL-15sc + | 1281 | 16953 | 3595 | 42942 | 8083 |
| huSTING N154S/ | | | | | |
| R284G tazCTT | | | | | |

SEM = Standard Error of the Mean

[1517] It is shown in the next Example, that the combined effects of the encoded payloads lead to synergistic results, as evidenced by the cures observed in mouse models of cancer.

### Example 32

### Combinations of muIL-15Rα-IL15sc, huSTING N154S/R284G tazCTT, and Murine Anti-CTLA-4 scFv-Fc, Demonstrate Superior Anti-Tumor Efficacy in a Highly Refractory Mouse Model of Triple Negative Breast Cancer

[1518] The synergistic effects observed in the previous Example (Example 31), are further shown in this Example, which shows that the combinations of payloads act synergistically in effecting cures. Various payload combinations were evaluated for in vivo efficacy in an orthotopic, T-cell excluded, and metastatic model of CPI (immune checkpoint inhibitor) refractory triple-negative breast cancer. For this experiment, 6-8 week-old female BALB/c mice (8 mice per group) were inoculated in the left mammary fat pad with EMT6 tumor cells (ATCC® CRL-2755™) (1×10⁶ cells in 100 μL PBS). Mice bearing 7 day-old established mammary tumors (˜65 mm³ in volume) were intravenously (IV) injected with a single dose of 1×10⁷ CFUs of strains of YS1646Δasd/ΔFLG/ΔpagP/ΔansB/ΔcsgD containing plasmids encoding the various payloads, alone, or in combination with weekly intraperitoneal (IP) injections of 100 μg of the anti-PD-L1 antibody atezolizumab. The YS1646Δasd/ΔFLG/ΔpagP/ΔansB/ΔcsgD strains contained plasmids encoding muIL-15Rα-IL15sc+huSTING N154S/R284G tazCTT, or muIL-15Rα-IL15sc+huSTING N154S/R284G tazCTT+muAnti-CTLA-4 scFv-Fc, or the control plasmid encoding β-actin, and were compared to treatment with PBS control.

[1519] The results are summarized in the table below. The tumors in the PBS-treated mice grew evenly, reaching a max tumor volume at day 31. Treatment of mice with the control β-actin plasmid did not demonstrate much evidence of anti-tumor efficacy (5% tumor growth inhibition (TGI), 2/8 cures), nor did treatment with IP anti-PD-L1 alone (17.9% TGI, 1/8 cures). Mice that were IV treated with the bacterial strain containing a plasmid encoding muIL-15Rα-IL15sc+huSTING N154S/R284G tazCTT demonstrated monotherapy efficacy (59.8% TGI, 3/8 cures), which improved with the combination of IP anti-PD-L1 (77.3% TGI, 5/8 cures). The combination of muIL-15Rα-IL15sc+huSTING N154S/R284G tazCTT+muAnti-CTLA-4 scFv-Fc also demonstrated significant monotherapy efficacy (62.4% TGI, 4/8 cures).

[1520] The therapeutic payload combinations were very well tolerated, and mice did not lose weight during the study. These data demonstrate the in vivo potency of IV administered immunostimulatory bacteria encoding the combinations of muIL-15Rα-IL15sc+huSTING N154S/R284G tazCTT, alone, or enhanced with IP administered anti-PD-L1, and muIL-15Rα-IL15sc+huSTING N154S/R284G tazCTT+muAnti-CTLA-4 scFv-Fc, in an orthotopic, T-cell excluded, and metastatic model of checkpoint inhibitor refractory triple-negative breast cancer (TNBC).

Effects of Combinations of Encoded Payloads, Delivered by Immunostimulatory Bacteria, with and without Addition of IP Anti-PD-L1, on the Inhibition of Tumor Growth and on the Cure Rates of Mice with Checkpoint Inhibitor Refractory Triple-Negative Breast Cancer

| Encoded Payload(s) and | Tumor Growth | |
|---|---|---|
| Anti-PD-L1 Treatments | Inhibition (TGI) | Cures |
| Beta-actin (plasmid control) | 5% | 2/8 |
| Intraperitoneal (IP) Anti- | 17.9% | 1/8 |
| PD-L1 alone | | |
| muIL-15Rα-IL15sc + | 59.8% | 3/8 |
| huSTING N154S/R284G tazCTT | | |
| muIL-15Ra-IL15sc + | 77.3% | 5/8 |
| huSTING N154S/R284G tazCTT + | | |
| IP Anti-PD-L1 | | |
| muIL-15Rα-IL15sc + | 62.4% | 4/8 |
| huSTING N154S/R284G tazCTT + | | |
| muAnti-CTLA-4 scFv-Fc | | |

[1521] A follow-up study was performed to evaluate the efficacy of higher doses of the muIL-15Rα-IL15sc+huSTING N154S/R284G tazCTT combination therapy, and for comparison with the efficacies of individually administered muIL-15Rα-IL15sc and huSTING N154S/R284G tazCTT. Strains of YS1646Δasd/ΔFLG/ΔpagP/ΔansB/ΔcsgD, containing plasmids encoding muIL-15Rα-IL15sc, huSTING N154S/R284G tazCTT, or the combination thereof, were administered intravenously (IV), at a dose of 3e7 CFUs, to mice bearing 7 day-old established mammary tumors, and were compared to PBS control. The tumors in the PBS-treated mice grew evenly, reaching a maximum tumor volume at day 31. As shown in the table below, mice treated with the bacterial strain containing a plasmid encoding muIL-15Rα-IL15sc or huSTING N154S/R284G tazCTT alone demonstrated 2/10 cures each, whereas the combination of muIL-15Rα-IL15sc+huSTING N154S/R284G tazCTT resulted in 7/10 cures.

| Encoded Payload(s) | Cures |
|---|---|
| PBS Control | 0/10 cures |
| muIL-15Rα-IL15sc | 2/10 cures |
| huSTING N154S/R284G tazCTT | 2/10 cures |
| muIL-15Rα-IL15sc + huSTING | 7/10 cures |
| N154S/R284G tazCTT | |

[1522] These data show the synergistic potency of combinations of a cytokine and a modified STING protein, such as the combination of muIL-15Rα-IL15sc+huSTING N154S/R284G tazCTT, for promoting complete responses. It is particularly significant, since these results were achieved in a highly refractory model of breast cancer, which highlights the general anti-tumor therapeutic potency of the combination. These results indicate the synergistic anti-tumor potency of the combination of a cytokine, such as the IL-15Rα-IL15sc fusion protein, and a STING protein, particularly a highly active STING protein, such as a gain-of-function constitutively active STING variant, or a gain-of-function constitutively active STING variant that is further modified to have reduced NF-κB signaling.

[1523] Cured mice from the muIL-15Rα-IL15sc+huSTING N154S/R284G tazCTT combination treatment groups (described above) then were evaluated for the ability to promote durable anti-tumor immunity in an orthotopic EMT6 tumor re-challenge study, and in a CD8⁺ T-cell dependent manner. For this study, 20 cured mice were divided into two groups of 10 mice each, and each mouse received IP injections of either 100 μg of an anti-CD8β antibody (which does not deplete CD8α⁺ dendritic cells), or 100 μg of an IgG isotype control, on days 3 and 1 prior to tumor re-challenge (day 56 and day 58 post-initial tumor implantation, respectively). The mice were bled prior to tumor re-challenge to confirm CD8⁺ T-cell depletion, and average circulating CD8⁺ T-cells were determined to be 5.72% for the isotype control, and 0.48% for the anti-CD8β antibody. The mice were then re-challenged with 1e6 EMT6 tumor cells, orthotopically on the opposite mammary fat pad, and compared to naïve, age-matched control mice (N=10). Mice from the naïve group all grew tumors to maximum tumor volume by day 30. Re-challenged mice from the anti-CD80 antibody-depleted group grew tumors even more aggressively than the naïve mice, whereas all 10 re-challenged mice from the IgG isotype antibody control group (i.e., mice without CD8⁺ T-cell depletion) were protected from tumor re-challenge. These data demonstrate the significant and durable anti-tumor efficacy of the combination of a cytokine and a modified gain-of-function constitutively active STING protein variant, such as when delivered in an immunostimulatory bacterium, such as a strain of YS1646Δasd/ΔFLG/ΔpagP/ΔansB/ΔcsgD bacteria, comprising plasmids encoding a combination of muIL-15Rα-IL15sc+huSTING N154S/R284G tazCTT. The combination of therapeutic payloads/proteins induces a high cure rate after IV administration of the bacteria, and mice are protected from tumor re-challenge in a CD8⁺ T-cell dependent manner.

### Example 33

### DLL3×CD3 T-Cell Redirection Antibody (TCRA) Design

[1524] T-cell redirection antibodies (TCRAs), or T-cell redirecting bispecific antibodies (TRBAs), are T-cell receptor (TCR) function-independent T-cell based immunotherapies, where the epsilon (F) domain of cluster of differentiation 3 (CD3), a component of the TCR complex, is targeted by one binding domain, while a second binding domain targets a tumor cell surface antigen. TCRAs include, for example, bispecific T-cell engagers (sold under the trademark BiTEs®), which are engineered antibody-based immunotherapies, that are fusion proteins of two single-chain variable fragments (scFvs), linked together by a peptide linker.

[1525] TCRAs induce the formation of a cytolytic synapse between the T-cell and the tumor cell, in an MHC-independent and TCR function-independent manner, by simultaneously binding to a tumor cell surface antigen, and to CD3 on T-cells, directing the cytolytic activity of T-cells selectively to the targeted tumor cells. Following the formation of the cytolytic synapse, the T-cells release cytotoxic proteins, such as perforin and granzymes (e.g., granzyme B), resulting in the apoptosis of the tumor cells. The activation of the T-cells results in the release of cytokines, engaging other immune cells and inducing a broader anti-tumor immune response. This results in the conversion of a non-inflamed (or cold) tumor environment to an inflamed (or hot) one, and results in the infiltration and proliferation of T-cells, and the killing of tumor cells. The original BiTE® antibodies have a short half-life; later generation BiTE® antibodies have an extended half-life by virtue of fusion to an Fc (see, e.g., Hipp et al. (2020) Clin. Cancer Res. 26:5258-5268; and Strohl, W. R. and Naso, M. (2019) Antibodies 8:41).

[1526] Delta-like ligand 3 (DLL3) is an inhibitory Notch pathway ligand that plays a role in Notch signaling during embryonal development. DLL3 is expressed intracellularly during embryonal development in normal tissues, with the highest expression in the fetal brain, but is absent in adult normal tissues. DLL3 is overexpressed in certain tumors, such as small cell lung cancers (SCLCs) and other high-grade neuroendocrine tumors, where, instead of being expressed intracellularly, it escapes to the cell surface, making it amenable to targeting with antibody-based therapeutics (see, e.g., Hipp et al. (2020) Clin. Cancer Res. 26:5258-5268). DLL3 also is expressed in other tumor types of neuroendocrine origin, including melanoma, glioblastoma multiforme, small cell bladder cancer, metastatic castration-resistant prostate cancer, and neuroendocrine lung tumors (see, e.g., Owen et al. (2019) Journal of Hematology & Oncology 12:61); hence, it is a useful target for TCRA-based therapies.

[1527] A DLL3×CD3 TCRA (see, SEQ ID NOs: 410 and 411 for the nucleotide and amino acid sequences, respectively; see, also, Hipp et al. (2020) Clin. Cancer Res. 26:5258-5268) was prepared from the light chain and heavy chain variable regions (V_{L} and V_{H}, respectively) of the anti-DLL3 clone hSC16.56 antibody (see, e.g., International Application Publication No. WO 2013/126746), and the light chain and heavy chain variable regions of the anti-CD3F clone 145-2C11 antibody (available from BioLegend).

[1528] The construct included the mouse IgGκ leader/signal sequence from the pSecTag2 vector (corresponding to residues 1-21 of SEQ ID NO:411; see, e.g., addgene.org) for secretion of the TCRA. The anti-DLL3 V_{H} domain (corresponding to residues 22-139 of SEQ ID NO:411) was linked to the anti-DLL3 V_{L}domain (corresponding to residues 155-261 of SEQ ID NO:411) via a 15 amino acid long (Gly₄Ser)₃ linker (corresponding to residues 140-154 of SEQ ID NO:411), forming an anti-DLL3 scFv. A 5 amino acid long Gly₄Ser linker (corresponding to residues 262-266 of SEQ ID NO:411) was inserted between the anti-DLL3 scFv and the anti-CD3 scFv. The anti-CD3 scFv contains the anti-CD3 V_{H} domain (corresponding to residues 267-382 of SEQ ID NO:411), linked, via a second (Gly₄Ser)₃ linker (corresponding to residues 383-397 of SEQ ID NO:411), to the anti-CD3 V_{L} domain (corresponding to residues 398-504 of SEQ ID NO:411). This construct was designated DLL3HL×CD3HL, to indicate the order in which the heavy (H) and light (L) chain variable domains of the anti-DLL3 and anti-CD3 antibodies appear in the molecule. A FLAG tag (DYKDDDDK; SEQ ID NO:412) can be added to the C-terminal end of this construct for detection (for the FLAG tag-labeled DLL3×CD3 TCRA, designated DLL3HL×CD3HL-FLAG TCRA, see SEQ ID NO:413).

[1529] Another DLL3×CD3 TCRA construct, designated DLL3LH×CD3HL TCRA (see, SEQ ID NOs: 414 and 415 for the nucleotide and amino acid sequences, respectively), was constructed similarly to the DLL3HL×CD3HL construct, but, as the designation implies, the anti-DLL3 scFv contains the anti-DLL3 V_{L} domain placed N-terminally to the anti-DLL3 V_{H} domain. The anti-CD3 scFv portion of the TCRA, the GS linkers, and the leader sequence for secretion, all are as described above for the DLL3HL×CD3HL construct. A FLAG tag-labeled version of the DLL3LH×CD3HL TCRA construct, designated DLL3LH×CD3HL-FLAG TCRA (see, SEQ ID NOS: 416 and 417 for the nucleotide and amino acid sequences, respectively), also was constructed.

### Example 34

### Evaluation of T-Cell Redirection Antibodies (TCRAs) For Target Binding, Conjugation, And Cytotoxicity

[1530] Antibodies directed against CD (cluster of differentiation) antigens, such as CD19 and CD3, are anti-cancer targets. Expression of certain CD antigens is restricted to specific lineage lymphohematopoietic cells. Antibodies directed against lymphoid-specific antigens have been developed as therapeutics. CD19 is a useful target because it is expressed on B cells, it is not shed, it is uniformly expressed on all lymphoma cells, and it is absent from stem cells. CD3 is expressed on T-cells as part of the T-cell receptor (TCR) complex, which contains three chains: CD3F, CD36, and CD37. The clustering of CD3 on T-cells, such as by immobilized anti-CD3 antibodies, results in T-cell activation that is similar to engagement of the T-cell receptor (TCR), but is independent of its clone typical specificity. A bispecific antibody, directed against each of the CD19 and the CD3 antigens, retargets T-cell cytotoxicity towards CD-19 positive cells (e.g., lymphoma cells), in an MHC-independent manner, and without the need for T-cell pre-stimulation or co-stimulation. Thus, such a molecule is particularly useful in inducing durable T-cell mediated anti-tumor immunity, and as an anti-cancer therapeutic.

[1531] The FLAG-tag variant sequence of the anti-CD19 and anti-CD3 TCRA, designated MT103 (SEQ ID NO:418; see, also, expired U.S. Pat. No. 7,112,324), was cloned into a vector designated pATI1.75 (described above). The MT103 TCRA construct contains a leader sequence (corresponding to residues 1-19 of SEQ ID NO:418), followed by a FLAG tag (DYKDDDDK; corresponding to residues 20-27 of SEQ ID NO:418), and an anti-CD19 scFv linked to an anti-CD3 scFv. The anti-CD19 scFv contains an anti-CD19 V_{L} domain (corresponding to residues 28-138 of SEQ ID NO:418), linked to an anti-CD19 V_{H} domain (corresponding to residues 154-277 of SEQ ID NO:418), via a (GGGGS)₃ linker (corresponding to residues 139-153 of SEQ ID NO:418). The anti-CD19 scFv is linked to the anti-CD3 scFv via a GGGGS linker (corresponding to residues 278-282 of SEQ ID NO:418). The anti-CD3 scFV contains an anti-CD3 V_{H} domain (corresponding to residues 283-401 of SEQ ID NO:418), linked via a peptide linker (VEGGSGGSGGSGGSGGVD; corresponding to residues 402-419 of SEQ ID NO:418), to an anti-CD3 V_{L} domain (corresponding to residues 420-525 of SEQ ID NO:418). The construct also includes a His tag (His₆; corresponding to residues 526-531 of SEQ ID NO:418).

[1532] HEK293T STING Null Cells (293-Dual™ Null Cells; InvivoGen) were seeded in 6-well plates coated with poly-L-lysine at 1.5e6 cells per well, and incubated overnight at 37° C. in a 5% CO₂ incubator, to achieve 80% confluency. The following day, 3000 ng of the MT103 plasmid DNA was diluted in serum-free media, and added to FuGENE® transfection reagent (Promega), at the proper reagent:DNA ratios, and the cells were transfected, with untransfected wells serving as negative controls (in duplicates). Cell culture supernatants from each sample were collected 48 hours post-transfection. The supernatant was either kept neat, or was concentrated using an Amicon® Ultra 4 mL centrifugal filter (Millipore Sigma).

[1533] To confirm the functionality of the expressed MT103 (CD19×CD3) TCRA, a flow cytometry experiment using Raji cells (purchased from ATCC) and Jurkat-Lucia™ NFAT cells (InvivoGen) was performed. The Raji cells are human lymphoblast cells that highly express CD19, and Jurkat cells are human T-lymphocytes that express CD3. 200,000 Raji cells, and 200,000 Jurkat cells, each were washed in PBS+2% FBS by centrifugation at 1300 RPM for 3 minutes. Then, 50 μL of either neat or concentrated cell culture supernatant, containing the expressed TCRA, was added to the cells, and incubated for 30 minutes at 37° C. in a 5% CO₂ incubator. The cells then were resuspended in PBS+2% FBS, and stained with an APC-labeled anti-FLAG tag antibody (BioLegend). The APC-labeled anti-FLAG tag antibody is added to label any MT103 TCRA (which contains a FLAG tag) that binds to CD19 on the Raji cells, and/or CD3 on the Jurkat cells. After a 30 minute incubation, the cells were washed twice with PBS+2% FBS by centrifugation at 1300 RPM for 3 minutes, and then were resuspended in PBS+2% FBS with DAPI (dead/live stain). Flow cytometry was performed, to detect any binding of the CD19×CD3 MT103 TCRA to CD19 on the Raji cells, and/or binding of the TCRA to CD3 on the Jurkat cells. 50,000 events were acquired for each sample. Flow cytometry data were acquired using the ACEA NovoCyte® flow cytometer (ACEA Biosciences, Inc.) and analyzed using the FlowJo™ software (Tree Star, Inc.).

[1534] As shown in the table below, the median fluorescence intensity (MFI) of APC detected from the Raji and the Jurkat cells that were incubated with either neat or concentrated MT103-containing cell culture supernatant, is much higher than the MFI detected from the cells incubated with untransfected cell culture supernatant, indicating that the MT103 TCRA binds to the CD19- and CD3-expressing cells.

Flow Cytometry Data for Cells Treated with the MT103 (CD19×CD3) TCRA

| Sample | MFI of APC + Cells |
|---|---|
| Raji cells stained with anti-FLAG-APC | 1021 |
| antibody only | |
| Raji cells stained with untransfected | 1064 |
| supernatant | |
| Raji cells stained with neat MT103- | 6334 |
| containing supernatant | |
| Raji cells stained with concentrated | 14544 |
| MT103-containing supernatant | |
| Jurkat cells stained with anti-FLAG-APC | 1035 |
| antibody only | |
| Jurkat cells stained with untransfected | 996 |
| supernatant | |
| Jurkat cells stained with neat | 4062 |
| MT103-containing supernatant | |
| Jurkat cells stained with concentrated | 12538 |
| MT103-containing supernatant | |

[1535] Additionally, the CD19×CD3 MT103 TCRA construct was tested in a co-culture of Raji and Jurkat-Lucia™ NFAT cells. The Jurkat-Lucia™ NFAT reporter cell line contains an NFAT-inducible Lucia™ construct, where expression of Lucia™ luciferase is driven by an ISG54 minimal promoter, fused to six copies of the NFAT (nuclear factor of activated T-cells; a transcription factor) consensus transcriptional response element. The Jurkat-Lucia™ NFAT cells, thus, can be used to study NFAT activation by monitoring Lucia™ luciferase activity; the levels of Lucia™ luciferase can be measured in the cell culture supernatant with QUANTI-Luc™, a Lucia™ luciferase detection reagent. In this experiment, the binding of the MT103 TCRA to both the CD19-expressing Raji cells, and the CD3-expressing Jurkat cells, activates the Jurkat cells (T-cells), resulting in NFAT-inducible Lucia™ luciferase secretion, which can be measured to determine the level of activation of the Jurkat cells.

[1536] Jurkat cells were seeded at 5e4 cells per well in a 96-well tissue culture plate. Raji cells were seeded at either 1e5 or 5e4 cells per well, for an Effector:Target (Jurkat:Raji) ratio of 1:2 or 1:1, respectively. The co-cultured cells were incubated with and without the neat or concentrated MT103-containing cell culture supernatant. 10-fold, 100-fold, and 1000-fold dilutions of the neat or concentrated supernatant were prepared and incubated with the co-cultures. The luminescence (i.e., secreted Lucia™ luciferase activity) resulting from the induced NEAT reporter was detected at 6 hours and 24 hours post-addition of the TCRA to the co-cultures.

[1537] The results are summarized in the table below, which shows that the activity of the MT103 TCRA results in increased luminescence from the Jurkat-Lucia™ NEAT reporter cell line, compared to the control samples without the addition of MT103, and to the control samples without the co-culture with Raji (target) cells. The luminescence resulting from the NEAT-inducible Lucia™ reporter construct decreases with the dilution of MT 103, in a dose-dependent manner. A longer incubation time (24 hours vs. 6 hours) results in increased luminescence, as expected, which is indicative of increased T-cell activation.

NFAT-Lucia™ Reporter Values from Co-Cultures of Jurkat and Raji Cells Treated with Different Concentrations of MT103, and with Different Effector:Target Ratios

| MT103 Neat | | MT103 Concentrated | | No MT103 | |
|---|---|---|---|---|---|
| Mean | ±SD | Mean | ±SD | Mean | ±SD |

1:2 Effector:Target (Jurkat:Raji) Ratio, 6 Hour Incubation

| | | | | | | |
|---|---|---|---|---|---|---|
| No dilution | 12110.5 | 837.9 | 3445.0 | 717.0 | 44.5 | 10.6 |
| 10-fold dilution | 4285.0 | 209.3 | 5880.0 | 581.2 | 70.0 | 15.6 |
| 100-fold dilution | 2253.5 | 507.0 | 3415.5 | 161.9 | 48.0 | 36.8 |
| 1000-fold dilution | 270.0 | 110.3 | 954.5 | 10.6 | 37.0 | 0.0 |
| No Raji (target) cells | 63.0 | 5.7 | 55.5 | 16.3 | 37.0 | 21.2 |

1:1 Effector:Target (Jurkat:Raji) Ratio, 6 Hour Incubation

| | | | | | | |
|---|---|---|---|---|---|---|
| No dilution | 4337.0 | 219.2 | 2057.5 | 20.5 | 26.0 | 15.6 |
| 10-fold dilution | 2113.0 | 36.8 | 2767.5 | 41.7 | 78.0 | 15.6 |
| 100-fold dilution | 965.5 | 26.2 | 1620.5 | 241.1 | 48.0 | 15.6 |
| 1000-fold dilution | 188.5 | 5.0 | 566.0 | 46.7 | 41.0 | 15.6 |
| No Raji (target) cells | 63.0 | 5.7 | 55.5 | 16.3 | 37.0 | 21.2 |

1:2 Effector:Target (Jurkat:Raji) Ratio, 24 Hour Incubation

| | | | | | | |
|---|---|---|---|---|---|---|
| No dilution | 47159.5 | 1038.7 | 11274.0 | 408.7 | 114.5 | 57.3 |
| 10-fold dilution | 12843.5 | 1047.2 | 13995.5 | 225.6 | 159.5 | 26.2 |
| 100-fold dilution | 5114.0 | 21.2 | 8767.5 | 204.4 | 189.0 | 36.8 |
| 1000-fold dilution | 562.5 | 94.0 | 1979.5 | 57.3 | 148.0 | 62.3 |
| No Raji (target) cells | 159.0 | 67.9 | 181.5 | 5.0 | 77.5 | 4.95 |

1:1 Effector:Target (Jurkat:Raji) Ratio, 24 Hour Incubation

| | | | | | | |
|---|---|---|---|---|---|---|
| No dilution | 18614.0 | 1540.1 | 6017.0 | 31.3 | 122.0 | 15.6 |
| 10-fold dilution | 7083.0 | 209.3 | 7479.0 | 717.0 | 181.5 | 26.2 |
| 100-fold dilution | 2908.5 | 41.7 | 5210.5 | 72.9 | 174.0 | 15.6 |
| 1000-fold dilution | 444.0 | 9.9 | 1213.5 | 94.0 | 163.0 | 52.3 |
| No Raji (target) cells | 159.0 | 67.9 | 181.5 | 5.0 | 77.5 | 4.95 |

SD = standard deviation

[1538] A cytotoxicity assay was performed using a co-culture of human CD8⁺ T-cells and Raji cells (Burkitt's lymphoma cells; i.e., tumor cells). Human CD8⁺ T-cells were isolated using the EasySep™ Human T-cell Isolation Kit (StemCell Technologies), and then were resuspended in RPMI+2% FBS, and seeded in a 96-well plate. CD8⁺ T-cells were seeded at 1e5 cells per well, or at 5e4 cells per well, and Raji cells were seeded at 10,000 cells per well, for Effector:Target (T-cell:Raji cell) ratios of 10:1 or 5:1, respectively. Concentrated or neat MT103-containing supernatant was diluted 10-fold, 100-fold, and 1000-fold, in RPMI+2% FBS, and then 50 μL of each supernatant sample was added to the co-cultures. The supernatant was collected after 5 hours of co-culture incubation, and analyzed using the CytoTox 96® Non-Radioactive Cytotoxicity Assay (Promega), per the manufacturer's instructions. The % cytotoxicity was calculated according to the manufacturer's instructions

[1539] As shown in the table below, higher amounts (concentrations) of MT103 result in higher % cytotoxicity. The % cytotoxicity decreases as the MT103-containing supernatant is diluted 10-fold, 100-fold, and 1000-fold, in a dose dependent manner.

Lysis of Raji Cells (% Cytotoxicity) in Co-Culture with CD8⁺ T-Cells and Varying Concentrations of MT103

| MT103 Neat | | MT103 Concentrated | | No MT103 | |
|---|---|---|---|---|---|
| Mean | ±SD | Mean | ±SD | Mean | ± SD |

5:1 Effector:Target (CD8⁺ T-Cell:Raji Cell) Ratio, 5 Hour Incubation

| | | | | | | |
|---|---|---|---|---|---|---|
| No dilution | NA | NA | NA | NA | 28.2 | 1.63 |
| 10-fold dilution | 59.0 | 9.6 | 78.8 | 7.5 | NA | NA |
| 100-fold dilution | 36.0 | 5.1 | 54.5 | 6.4 | NA | NA |
| 1000-fold dilution | 3.7 | 3.6 | 32.8 | 2.4 | NA | NA |

10:1 Effector:Target (CD8⁺ T-Cell:Raji Cell) Ratio, 5 Hour Incubation

| | | | | | | |
|---|---|---|---|---|---|---|
| No dilution | NA | NA | NA | NA | 18.0 | 1.0 |
| 10-fold dilution | 51.9 | 5.4 | 77.6 | 1.6 | NA | NA |
| 100-fold dilution | 38.5 | 2.6 | 51.9 | 2.2 | NA | NA |
| 1000-fold dilution | NA | NA | 16.8 | 2.2 | NA | NA |

SD = Standard deviation;
NA = not applicable

### Example 35

### Immunostimulatory Bacterial Delivery of Tumor-Associated Antigens Encoded in Expression Plasmids

[1540] This Example describes exemplary tumor-associated antigens (TAAs) that can be delivered by the immunostimulatory bacteria. Upon treatment with the engineered immunostimulatory bacteria, the delivery of tumor-associated antigens to tumor-resident myeloid cells, such as macrophages and dendritic cells, allows for the priming and activation of antigen-specific T-cells to result in an anti-tumor response.

[1541] Among the tumor-associated antigens encoded by the plasmids in the immunostimulatory bacteria are those categorized as oncofetal or oncoviral. Some of the antigens are either overexpressed by, or they accumulate in tumors. The antigens include those that are lineage-restricted, mutated, or post-translationally altered. Non-limiting examples of tumor-associated antigens in each of these categories, and their associated cancer types (indications), are set forth in the following table.

| Category of Tumor-Associated | | |
|---|---|---|
| Antigen (TAA) | Name/Family Name of TAA | Cancer Histology |
| Oncofetal | Carcinoembryonic antigen | Colorectal carcinoma |
| | (CEA) | |
| | Immature laminin receptor | Renal cell carcinoma (RCC) |
| | Tumor-associated glycoprotein | Prostate carcinoma |
| | 72 (TAG-72) | |
| Oncoviral | HPV E6, HPV E7 | Cervical carcinoma |
| Overexpressed/Accumulated | BING-4 | Melanoma |
| | Epidermal Growth Factor | Colorectal carcinoma (CRC) |
| | Receptor (EGFR) | |
| | Wilms' Tumor Protein | Multi |
| | Calcium-activated chloride | Lung carcinoma |
| | channel 2 | |
| | Cyclin-B1 | Multi |
| | 9D7 | RCC |
| | Epithelial cell adhesion | Breast carcinoma |
| | molecule (EpCAM) | |
| | Ephrin type-A receptor 3 | Multi |
| | (EphA3) | |
| | Human epidermal growth factor | Multi |
| | receptor 2 (HER2/Neu) | |
| | Telomerase | Multi |
| | Mesothelin | Ductal pancreatic carcinoma |
| | Stomach-cancer-associated | Colorectal carcinoma (CRC) |
| | protein tyrosine phosphatase 1 | |
| | (SAP-1) | |
| | Survivin | Multi |
| Cancer-Testis | BAGE (B melanoma antigen) | Multi |
| | family | |
| | CAGE family | Multi |
| | GAGE family | Multi |
| | MAGE (melanoma antigen) family | Multi |
| | SAGE (sarcoma antigen) family | Multi |
| | PAGE family | Multi |
| | XAGE family | Multi |
| | CT9, CT10 | Multi |
| | New York esophageal squamous | Multi |
| | cell carcinoma 1 (NY-ESO-1), | |
| | LAGE-1 | |
| | Preferentially expressed antigen | Multi |
| | in melanoma (PRAME) | |
| | synovial sarcoma/X breakpoint | Melanoma, Multi |
| | 2 (SSX-2) | |
| Lineage-Restricted | Melanoma antigen recognized | Melanoma |
| | by T-cells 1 (Melan-A/MART-1) | |
| | gp100/Pmel17 | Melanoma |
| | Tyrosinase | Melanoma |
| | Tyrosinase related protein | Melanoma |
| | (TRP)-1, TRP-2 | |
| | P. polypeptide | Melanoma |
| | Melanocortin 1 receptor | Melanoma |
| | (MC1R) | |
| | Prostate-specific antigen (PSA) | Prostate carcinoma |
| Mutated | β-catenin | Melanoma, Prostate carcinoma, |
| | | Hepatocellular carcinoma (HCC) |
| | BRCA1, BRCA2 | Breast carcinoma, |
| | | ovarian carcinoma |
| | Cyclin dependent kinase 4 | Multi |
| | (CDK4) | |
| | Chronic Myelogenous | Chronic myelogenous |
| | Leukemia Tumor Antigen 66 | leukemia (CML) |
| | (CML66) | |
| | Fibronectin | Multi |
| | Melanoma antigen recognized | Melanoma |
| | by T-cells 2 (MART-2) | |
| | p53 | Multi |
| | Ras | Multi |
| | TGF-β receptor type II | Colorectal carcinoma |
| | (TGF-βRII) | |
| Post-Translationally | Mucin 1, Cell Surface | Ductal carcinoma, RCC |
| Altered | Associated (MUC1) | |
| Idiotypic | Immunoglobulin (Ig), T-cell | B-cell leukemia, T-cell |
| | Receptor (TCR) | leukemia, lymphoma, myeloma |

### Example 36

### Ectopic Protein Synthesis in Eukaryotic Cells from Bacterial-Derived RNA Delivery

[1542] As described in the detailed description, in addition to plasmid DNA delivery, immunostimulatory bacterial can be used to directly deliver bacterial-derived RNA, such as mRNA, into infected myeloid cells. Direct delivery of RNA obviates the need for plasmid DNA delivery, which relies on the eukaryotic transcription and translation machinery, as well as proper trafficking of plasmid DNA to the host cell nucleus. Direct delivery of RNA, such as mRNA, bypasses host trafficking and transcriptional processes, to rely only on eukaryotic translation machinery for protein production. The delivery of bacterial-derived RNA requires the de-coupling of bacterial transcription from bacterial translation, in order to prevent problematic translation of foreign proteins in the bacteria. Many eukaryotic proteins are complex proteins that require proper folding conditions, an endoplasmic reticulum, proper post-translational modifications, including disulfide bonds, and host chaperones for folding. Over-expression of foreign proteins in bacteria can reduce strain fitness, decrease doubling time, and reduce strain stability.

[1543] To demonstrate that mRNA delivery occurs during treatment with the immunostimulatory bacteria, a series of plasmids were engineered with either eukaryotic or bacterial promoters driving the expression of mu4-1BBL_T2A_muIL-12p70 HPRE bGHpA, with the presence and absence of an intervening encephalo-myocarditis virus Internal Ribosome Entry Site (EMCV IRES). The EMCV IRES, which is non-functional in bacteria, reduces prokaryotic translation and enhances eukaryotic translation. There is only one known eukaryotic IRES, from the Dicistroviridae family of viruses, that functions in bacteria (see, e.g., Colussi et al. (2015) Nature 519(7541):110-113). Thus, in general, IRES elements do not function in bacteria. The promoter-IRES (or promoter-Kozak) combinations also were cloned into an mCherry fluorescent reporter gene (Takara Bio), so that bacterial expression from the regulatory sequences could be rapidly assessed by fluorescence.

[1544] To measure the bacterial expression of the fluorescent mCherry protein, overnight cultures of bacterial strains were washed in PBS, and normalized by OD₆₀₀ to 0.1. For every bacterial culture, the percentage of mCherry expression was analyzed by flow cytometry using the NovoCyte® Flow Cytometer (ACEA Biosciences, Inc.). The level of ectopic gene expression after bactofection, using a co-culture system of infected primary human M2 macrophages and HEK-Blue™ IL-12 reporter cells (InvivoGen), was measured. HEK-Blue™ IL-12 cells are HEK293 cells that express the IL-12 receptor, as well as genes in the IL-12 signaling pathway, and a STAT4-inducible SEAP reporter gene. The binding of IL-12 to the IL-12 receptor on the surface of HEK-Blue™ IL-12 cells triggers a signaling cascade leading to the activation of STAT-4, with the subsequent production of SEAP. Detection of SEAP in the supernatant of HEK-Blue™ IL-12 cells can be readily assessed using QUANTI-Blue™ Solution. Thus, these reporter cells are used to measure the expression of IL-12.

[1545] Primary human monocytes were differentiated in ImmunoCult™-SF Macrophage Medium, containing 100 ng/ml M-CSF, for 3 days, and then supplemented with additional medium containing 200 ng/ml M-CSF, 20 ng/ml IL-4, and 20 ng/ml IL-10, for 4 more days. The cells were then infected with stationary phase immunostimulatory bacteria, which were grown overnight at 37° C. in 4×YT medium, at an MOI of 50. The cells were inoculated with bacteria and centrifuged for 5 minutes at 500 rcf, followed by an incubation at 37° C. for 1 hour. The cells were then washed twice with DPBS, and then incubated in fresh ImmunoCult™-SF Macrophage Medium, containing 100 μg/ml gentamicin, to remove extracellular bacteria. Infected macrophages were then co-cultured with the HEK-Blue™ IL-12 reporter cells, at a ratio of 2.5:1 (macrophages to HEK-Blue™ cells). At 48 hours post-infection, 5 μl of cell culture supernatants were incubated with 180 μl of QUANTI-Blue™ solution (which detects SEAP), and incubated at 37° C., to allow for the color to develop. Thus, the expression of IL-12 by the infected macrophages is assessed by measuring the SEAP levels in the supernatants, which is produced by the HEK-Blue™ cells upon binding of IL-12 to the IL-12 receptor on their cell surfaces.

[1546] The results, which are summarized in the Table below, show that the infected control (EF-1α-NanoLuc® luciferase) stimulates a baseline level of IL-12 expression in primary human M2 macrophages, and very little fluorescence from mCherry expression in the bacteria. The CMV-Kozak pair drives a higher level of IL-12 expression after bactofection, as well as a higher level of mCherry protein expression. This is attributable to the low levels of bacterial “leakiness” that occur from the CMV promoter in bacteria. The two bacterial promoters that were tested, rpsM and MTL, when paired with a Kozak sequence, induce levels of IL-12 expression in primary human M2 macrophages that are lower than the CMV promoter, but higher than EF-1α-NanoLuciferase control, and both promoters drive a high level of mCherry protein expression in bacteria. These results indicate that mRNA delivery is occurring, because the bacterial promoters are non-functional in eukaryotic hosts. The levels of expression of the IL-12 reporter protein are higher when the bacterial promoters are coupled with an IRES, indicating that protein expression from delivered mRNA is enhanced at the translational level by the presence of a eukaryotic IRES. The presence of an IRES also reduces the amount of mCherry expression in the bacteria, indicating that the secondary structure of the RNA inhibits expression even when coupled with a bacterial promoter.

[1547] Including an IRES in the constructs, downstream from the promoter and before a start codon, inhibits or prevents translation in bacteria, so that the bacteria serve as delivery agents for mRNA. The bacteria, such as the immunostimulatory bacteria provided in this application, are designed to infect host cells, such as tissue-resident macrophages (e.g., tumor-resident myeloid cells), and to deliver the encoded RNA into the host cells. The bacteria can auxotrophic, such as asd⁻, so that they can be grown in vitro, but such that they do no grow when introduced into a host, such as a human. The bacteria deliver their contents to host cells, and do not reproduce.

| | | Promoter- | | | Fluorescence |
|---|---|---|---|---|---|
| | | IRES or | Absorbance | | (m Cherry |
| Promoter | | Promoter- | (650 nm) | IL-12 | Expression |
| Type | IRES | Kozak | IL-12-SEAP | Range | in Bacteria) |
| Eukaryotic | No | EF-1α- | 0.4585 | 0.1042 | 0.00403 |
| | | Kozak- | | | |
| | | NanoLuc ® | | | |
| Eukaryotic | No | CMV-Kozak | 0.60545 | 0.1315 | 9.43 |
| Prokaryotic | No | rpsM-Kozak | 0.47785 | 0.0233 | 21.1 |
| Prokaryotic | Yes | rpsM-IRES | 0.5802 | 0.106 | 0.82 |
| Prokaryotic | No | MTL-Kozak | 0.55295 | 0.0757 | 85.8 |
| Prokaryotic | Yes | MTL-IRES | 0.75665 | 0.0801 | 4.19 |

[1548] Bacteria are cultured in vitro to produce encoded RNA, which, because of the presence of an IRES or other such regulatory sequence that prevents or inhibits bacterial translation, results in the production of RNA, such as mRNA by the bacteria. Upon infection of eukaryotic host cells, such as human macrophages, by the bacteria, the RNA is translated, producing the encoded product, such as, for example, an antigen.

[1549] Bacteria are advantageous vessels for RNA delivery, because bacteria readily can be cultured in large amounts, and then stored and/or formulated or provided as powder, a tablet, or a liquid for injection. They can be administered by any suitable route, including intravenously, and mucosally through the nose or lungs. They are very stable, and will provide large, stable quantities of RNA.

[1550] The immunostimulatory bacteria provided herein, when used for the delivery of RNA, such as mRNA, for example, when used as vaccines, or to encode viral antigens and/or other proteins to protect against pathogens, such as Severe Acute Respiratory Syndrome coronavirus 2 (SARS-CoV-2, which causes COVID-19), can encode the full length wild-type SARS-CoV-2 spike protein (see, e.g., SEQ ID NO:438), or can encode the full length receptor binding domain (RBD) of the SARS-CoV-2 spike protein (see, SEQ ID NO:440), or can encode a portion of the spike protein RBD (see, e.g., SEQ ID NO:441) that is sufficient to induce or cause an immune response, and/or to immunize or vaccinate or protect a subject against SARS-CoV-2. The immunostimulatory bacteria also can deliver mRNA encoding mutants of the SARS-CoV-2 spike protein, with mutations in the spike protein or a portion thereof, such as the RBD or a portion thereof, that increase or enhance the expression of the spike protein or RBD or portions thereof, and/or that increase or enhance the binding of the spike protein or RBD, or the portions thereof to the ACE2 receptor.

[1551] The spike protein or spike protein RBD mutants include any described herein and known in the art, including, but not limited to, those comprising the mutations V367F, D614G, G476S, V483A, H49Y, N501Y, N501F, N501W, N501V, F817P, A892P, A899P, A942P, K986P, V987P, V417K, G502D, N501T, Q498Y, W436R and D364Y, and those comprising mutations at residues corresponding to residues N439/R426, L452/R426, T470/N457, E484/P470, Q498/Y484 and N501/T487 of the spike protein or portion thereof. The immunostimulatory bacteria can be used as vaccines against SARS-CoV-2 by delivering mRNA encoding any of the antigenic sequences or modified forms of the SARS-CoV-2 spike protein or RBD, including portions thereof, as described, for example, in U.S. Pat. Nos. 10,973,908 and 10,702,600. The immunostimulatory bacteria also can be used as vaccines/for mRNA delivery, to deliver the mRNA uin the Pfizer-BioNTech COVID-19 vaccine, and in the Moderna COVID-19 vaccine, as described elsewhere herein. SARS-CoV-2 proteins for use as antigens, include, for example, spike protein, nucleocapsid and M protein and antigenic portions thereof. The immunostimulatory bacteria can be used to deliver universal flu antigens, such as flu vaccines that elicit antibodies against HA proteins from a variety of flue strains, such as influenza type A strains (H1 and H3) and influenza type B strains. Other combinations include repeating patters of HA eptiopes, such as the FlusMos-v1. See, e.g., Nachbaguer et al. (2021) Nature Medicine 27:106-114, which provides a chimeric hemagglutinin-based universal influenza vaccine.

### Example 37

### Immunomodulatory Strains Containing Human IL-15Rα-IL-15sc and huSTING N154S/R284G tazCTT Colonize Autochthonous Murine Tumors

[1552] It previously has been reported that the attenuated Salmonella strain YS1646 is able to colonize tumors in the 4T1 murine breast transplant model (average tumor size 400 mm³, average CFUs/g=10⁸), but is significantly less able to colonize the spontaneous BALB-NeuT breast tumor model (average tumor size 400 mm³, average CFUs/g=103; see, e.g., Drees et al. (2015) J. Cancer 6(9):843-848).

[1553] In order to show that the immunostimulatory bacteria provided herein do not have a similar deficiency in colonizing spontaneous tumors compared to transplanted tumors, tumors were collected from the orthotopically-transplanted EMT6 mouse model of breast cancer, and compared to tumors collected from the spontaneous MMTV-PyMT breast cancer model. For the EMT6 model, 6-8 week-old female BALB/c mice (5 mice per group) were inoculated orthotopically in the 4^{th} mammary fat pad with EMT6 cells (1×10⁶ cells in 100 μL PBS). Mice bearing 7-day established flank tumors (average tumor size of 56 mm³) were IV injected with a single dose of 3×10⁷ CFUs of the YS1646Δasd/ΔFLG/ΔpagP/ΔansB/ΔcsgD strain, containing a plasmid encoding the combination of huIL-15Rα-ILL-15sc+huSTING N154S/R284G tazCTT. At day 4 post-IV dosing, mice were euthanized, and tumors were homogenized and plated on LB plates to enumerate the number of colony forming units (CFUs) per gram of tumor tissue. The YS1646Δasd/ΔFLG/ΔpagP/ΔansB/ΔcsgD strain colonized tumors at a mean of 1.7×10⁷ CFUs per gram of tumor tissue.

[1554] For the spontaneous model of breast cancer, MMTV-PyMT mice were IV injected with 3×10⁷ CFUs of the same bacterial strain when their largest tumors measured an average of 272 mm³ in volume. Tumors were collected at day 6 post-IV dosing. Tumors were homogenized and plated on LB plates to enumerate the number of CFUs per gram of tumor tissue. All tumors collected were found to be well colonized despite a range of tumor weights (0.05 g to 0.36 g, N=7), with a mean of 2.89×10⁶ CFUs/g. These data demonstrate that, unlike the parental YS1646 strain, the immunomodulatory YS1646Δasd/ΔFLG/ΔpagP/ΔansB/ΔcsgD strain, containing the plasmid encoding the combination of huIL-15Rα-IL-15sc+huSTING N154S/R284G tazCTT, was able to colonize spontaneous MMTV-PyMT tumors at a comparable level to the transplanted EMT6 tumors (P=0.18, NS).

[1555] Since, unlike the transplanted tumors, the spontaneous tumors have vasculature that is more comparable to human tumors, these data indicate that the immunostimulatory bacteria will colonize human tumors at a much higher rate/level than the parental YS1646 strain was reported to in a phase I clinical trial of advanced cancer patients (see, e.g., Toso et al. (2002) J. Clin. Oncol. 20(1):142-152).

### Example 38

### Immunomodulatory Bacterial Strains, Containing Plasmids Encoding Human IL-15Rα-IL-15sc and huSTING N154S/R284G tazCTT, or a NanoLuciferase® Luciferase Control Plasmid, are Well Tolerated in Non-Human Primates

[1556] In a phase I human clinical trial, it was reported that the maximum tolerated dose (MTD) of the parental YS1646 strain is 3×10⁸ CFUs/m², and that the dose-limiting toxicity (DLT) dose was 1×10⁹ CFUs/m² (see, e.g., Toso et al. (2002) J. Clin. Oncol. 20(1):142-152). At these doses, the toxicities and adverse events, such as fever, hypotension, thrombocytopenia, anemia, vomiting, diarrhea, nausea, and hypophosphatemia, were attributed to very high serum levels of pro-inflammatory cytokines, measured at 4 hours post-IV dosing, including TNF-α (approximately 500,000 pg/mL), IL-6 (approximately 500,000 pg/mL), and IL-10 (approximately 200 pg/mL). In a separate study, strain YS1646 was evaluated in a non-human primate (NHP) study using cynomolgus monkeys. In this study, 1×10⁹ CFUs/monkey was found to be the MTD (Human Equivalent Dose (HED)=4×10⁹ CFUs/m²), while a dose of 1×10¹⁰ CFUs/monkey was considered not tolerated (HED=4×10¹⁰ CFUs/m²). DLTs at the top dose were attributed to liver-associated adverse events (AEs), and serum cytokines were not measured (see, e.g., Lee et al. (2000) International Journal of Toxicology 19:19-25). Since the NHPs tolerated strain YS1646 much better than the humans, with an MTD value of a log higher than the human MTD, it can be inferred that the cytokine levels of the monkeys would be approximately a log lower than those measured in humans.

[1557] To determine the MTD and serum cytokine profile of immunostimulatory bacteria provided herein, such as strains that lack flagella and that are msbB⁻/pagP⁻, in NHPs, a tolerability study was performed. For this study, 15 previously untreated male cynomolgus monkeys, with ages ranging from 24 to 50 months, were utilized. The NHPs were IV administered the YS1646Δasd/ΔFLG/ΔpagP/ΔansB/ΔcsgD/F-ΔpurI strain (discussed above), containing a plasmid encoding the combination of huIL-15Rα-ILL-15sc+huSTING N154S/R284G tazCTT, at doses of 3×10⁸ CFUs/monkey, 1×10⁹ CFUs/monkey, or 3×10⁹ CFUs/monkey (3 NHPs per dosing group), or were IV administered the YS1646Δasd/ΔFLG/ΔpagP/ΔansB/ΔcsgD strain, containing a plasmid encoding NanoLuciferase® luciferase, at a dose of 3×10⁸ CFUs/monkey (3 NHPs per group), and compared to the saline vehicle control group (N=3). The NHPs were bled prior to dosing, 4 hours post-dosing, and 24 hours post-dosing, and serum cytokine levels were measured using a monkey cytokine U-Plex panel (Meso Scale Discovery), according to the manufacturer's protocol.

[1558] The results, which are summarized in the tables below, show that the bacterial strains were well-tolerated at all dose levels tested, and no clinical findings were reported that differed significantly from the saline (PBS) control group. Thus, no MTD could be established in this study. Serum cytokine levels were very low overall, particularly for the cytokines that were attributed to dose-limiting toxicities (DLTs) in the human clinical trial with strain YS1646, such as the cytokines measured 4 hours post-IV dosing in the 3×10⁹ CFUs/monkey dose group (HED=1.2×10¹⁰ CFUs/m²), including TNF-α (mean concentration of 4.6 μg/mL), IL-6 (mean concentration of 376.9 μg/mL), and IL-10 (mean concentration of 0.88 μg/mL). Only the serum cytokine levels of IP-10/CXCL10 (mean concentration of 10,549.6 μg/mL) and MCP-1/CCL2 (mean concentration of 6247.7 μg/mL) were high in the top dose level group, 4 hours post-dosing, and remained elevated at 24 hours post-dosing. These analytes are not associated with toxicity, and can indicate a more favorable immune profile. In summary, the immunostimulatory bacteria provided herein, including those containing plasmids encoding payloads, are very well-tolerated in NHPs. It can thus be inferred, from these data, that there will be a high level of tolerability of the immunostimulatory bacterial strains in humans.

### Serum Cytokines Levels Prior to Dosing

| | | Immunostimulatory Bacterial Strain and Dose (CFUs/NHP) | | | | |
|---|---|---|---|---|---|---|
| | | | YS1646Δasd/ΔFLG/ΔpagP/ΔansB/ΔcsgD/F-ΔpurI + | | | YS1646Δasd/ΔFLG/ |
| | | | p2.1 CMV VCIP huIL-15Rα-IL15sc_T2A_STING | | | ΔpagP/ΔansB/ΔcsgD + |
| | | PBS | N154S/R284G tazCTT | | | NanoLuc ® Plasmid |
| | | Control | 3 × 10⁸ | 1 × 10⁹ | 3 × 10⁹ | 3 × 10⁸ |
| | | — | CFUs/NHP | CFUs/NHP | CFUs/NHP | CFUs/NHP |
| IFN-γ | Mean (pg/ml) | 3.87 | 0.24 | 0.80 | 3.78 | 0.00 |
| | ±SD | 0.00 | 0.00 | 0.78 | 0.00 | 0.00 |
| IL-10 | Mean (pg/ml) | 0.08 | 0.03 | 0.05 | 0.09 | 0.08 |
| | ±SD | 0.06 | 0.02 | 0.03 | 0.02 | 0.02 |
| IL-12p70 | Mean (pg/ml) | 0.56 | 0.32 | 1.43 | 1.23 | 0.30 |
| | ±SD | 0.27 | 0.16 | 1.87 | 1.08 | 0.21 |
| IL-1β | Mean (pg/ml) | 0.08 | 0.05 | 0.70 | 0.09 | 0.26 |
| | ±SD | 0.00 | 0.05 | 1.15 | 0.12 | 0.00 |
| IL-2 | Mean (pg/ml) | 0.00 | 2.29 | 0.00 | 17.32 | 0.00 |
| | ±SD | 0.00 | 0.00 | 0.00 | 0.00 | 0.00 |
| IL-6 | Mean (pg/ml) | 0.38 | 0.41 | 1.01 | 2.56 | 0.79 |
| | ±SD | 0.23 | 0.17 | 0.14 | 4.10 | 0.47 |
| IP-10 | Mean (pg/ml) | 605.50 | 639.54 | 813.35 | 766.50 | 684.53 |
| | ±SD | 154.57 | 54.59 | 248.99 | 297.89 | 46.50 |
| MCP-1 | Mean (pg/ml) | 361.83 | 249.90 | 284.35 | 275.21 | 268.46 |
| | ±SD | 11.71 | 28.90 | 65.43 | 210.65 | 65.80 |
| TNF-α | Mean (pg/ml) | 0.33 | 0.41 | 0.83 | 0.37 | 0.45 |
| | ±SD | 0.15 | 0.48 | 0.55 | 0.13 | 0.00 |
| IL-15 | Mean (pg/ml) | 11.39 | 9.05 | 8.25 | 9.54 | 13.03 |
| | ±SD | 1.52 | 2.29 | 1.31 | 2.64 | 7.02 |

SD = standard deviation

Serum Cytokine Levels, 4 Hours after Dosing

| | | Immunostimulatory Bacterial Strain and Dose (CFUs/NHP) | | | | |
|---|---|---|---|---|---|---|
| | | | YS1646Δasd/ΔFLG/ΔpagP/ΔansB/ΔcsgD/F-ΔpurI + | | | YS1646Δasd/ΔFLG/ |
| | | | p2.1 CMV VCIP huIL-15Rα-IL15sc_T2A_STING | | | ΔpagP/ΔansB/ΔcsgD + |
| | | PBS | N154S/R284G tazCTT | | | NanoLuc ® Plasmid |
| | | Control | 3 × 10⁸ | 1 × 10⁹ | 3 × 10⁹ | 3 × 10⁸ |
| | | — | CFUs/NHP | CFUs/NHP | CFUs/NHP | CFUs/NHP |
| IFN-γ | Mean (pg/ml) | 1.35 | 6.87 | 26.49 | 22.62 | 4.03 |
| | ±SD | 1.09 | 5.48 | 34.96 | 21.59 | 2.51 |
| IL-10 | Mean (pg/ml) | 0.068 | 0.481 | 0.508 | 0.586 | 0.387 |
| | ±SD | 0.050 | 0.149 | 0.125 | 0.269 | 0.113 |
| IL-12p70 | Mean (pg/ml) | 0.05 | 0.52 | 1.21 | 1.17 | 0.45 |
| | ±SD | 0.01 | 0.36 | 1.03 | 1.12 | 0.06 |
| IL-1β | Mean (pg/ml) | 0.08 | 0.34 | 0.55 | 0.88 | 0.33 |
| | ±SD | 0.04 | 0.14 | 0.16 | 0.62 | 0.13 |
| IL-2 | Mean (pg/ml) | 0.00 | 0.52 | 0.11 | 10.33 | 0.00 |
| | SD | 0.00 | 0.00 | 0.00 | 11.24 | 0.00 |
| IL-6 | Mean (pg/ml) | 3.0 | 95.3 | 116.7 | 376.9 | 34.8 |
| | ±SD | 1.4 | 105.3 | 70.7 | 318.1 | 26.4 |
| IP-10 | Mean (pg/ml) | 363.0 | 9529.3 | 11838.7 | 10549.6 | 11143.2 |
| | ±SD | 19.6 | 4596.6 | 82.0 | 2362.7 | 1231.4 |
| MCP-1 | Mean (pg/ml) | 475.5 | 5017.5 | 5642.4 | 6247.7 | 3700.4 |
| | ±SD | 143.0 | 3755.6 | 1622.2 | 2492.8 | 2209.3 |
| TNF-α | Mean (pg/ml) | 0.1 | 1.8 | 3.4 | 4.6 | 1.1 |
| | ±SD | 0.1 | 1.5 | 0.2 | 4.1 | 0.5 |
| IL-15 | Mean (pg/ml) | 12.73 | 14.45 | 14.84 | 15.32 | 14.9 |
| | ±SD | 2.5 | 4.07 | 3.29 | 3.91 | 3.48 |

SD = standard deviation

Serum Cytokine Levels, 24 Hours after Dosing

| | | Immunostimulatory Bacterial Strain and Dose (CFUs/NHP) | | | | |
|---|---|---|---|---|---|---|
| | | | YS1646Δasd/ΔFLG/ΔpagP/ΔansB/ΔcsgD/F-ΔpurI + | | | YS1646Δasd/ΔFLG/ |
| | | | p2.1 CMV VCIP huIL-15Rα-IL15sc_T2A_STING | | | ΔpagP/ΔansB/ΔcsgD + |
| | | PBS | N154S/R284G tazCTT | | | NanoLuc ® Plasmid |
| | | Control | 3 × 10⁸ | 1 × 10⁹ | 3 × 10⁹ | 3 × 10⁸ |
| | | — | CFUs/NHP | CFUs/NHP | CFUs/NHP | CFUs/NHP |
| IFN-γ | Mean (pg/ml) | 0.71 | 0.79 | 1.65 | 3.32 | 6.63 |
| | ±SD | 0.83 | 0.51 | 2.15 | 3.13 | 0.97 |
| IL-10 | Mean (pg/ml) | 0.0577 | 0.0906 | 0.0672 | 0.0988 | 0.1000 |
| | ±SD | 0.0362 | 0.0428 | 0.0629 | 0.0631 | 0.0617 |
| IL-12p70 | Mean (pg/ml) | 0.25 | 0.35 | 0.98 | 2.51 | 0.31 |
| | ±SD | 0.03 | 0.22 | 1.38 | 2.50 | 0.11 |
| IL-1β | Mean (pg/ml) | 0.02 | 0.02 | 0.36 | 0.15 | 0.09 |
| | ±SD | 0.02 | 0.00 | 0.57 | 0.04 | 0.03 |
| IL-2 | Mean (pg/ml) | 0.00 | 0.00 | 0.00 | 3.19 | 0.00 |
| | ±SD | 0.00 | 0.00 | 0.00 | 0.00 | 0.00 |
| IL-6 | Mean (pg/ml) | 0.6 | 8.0 | 5.3 | 19.8 | 3.0 |
| | ±SD | 0.2 | 1.9 | 3.0 | 17.4 | 0.7 |
| IP-10 | Mean (pg/ml) | 475.6 | 1579.7 | 2354.0 | 3638.2 | 2762.1 |
| | ±SD | 180.7 | 339.5 | 1475.8 | 4036.5 | 1752.8 |
| MCP-1 | Mean (pg/ml) | 266.5 | 340.1 | 258.2 | 525.7 | 393.1 |
| | ±SD | 5.9 | 39.9 | 41.2 | 285.5 | 270.7 |
| TNF-α | Mean (pg/ml) | 0.1 | 0.2 | 0.4 | 0.4 | 0.5 |
| | ±SD | 0.1 | 0.0 | 0.3 | 0.2 | 0.6 |
| IL-15 | Mean (pg/ml) | 11.09 | 16.07 | 12.17 | 15.87 | 18.63 |
| | ±SD | 2.51 | 4.26 | 1.56 | 4.83 | 2.81 |

SD = standard deviation

### Example 39

### Thymidine Auxotroph Strains

[1560] The Salmonella typhimurium essential gene thyA encodes thymidylate synthase, a key enzyme in DNA synthesis. Deletion or mutation of the gene renders the strain auxotrophic for thymidine. Upon deprivation of the complementing substrate, bacterial cell death occurs and it has been demonstrated that no macromolecules are released from thyA mutants upon thymidine starvation (Loessner et al., FEMS Microbiol Lett. 265(1): 81-88 (2006)), reducing potential release of PAMPs and subsequent activation of innate inflammatory responses. To generate a thymidine auxotroph that is incapable of replication in vivo and rapidly dies in the absence of supplemented thymidine, thyA was deleted from strain YS1646Δasd/ΔFLG/ΔpagP/ΔansB/ΔcsgD/F-ΔpurI.

[1561] A 690 bp region containing the thyA gene (SEQ ID NO: 464; DC51_3078), was targeted for deletion using modifications of the method of Datsenko and Wanner (Proc. Natl. Acad. Sci. U.S.A. 97:6640-6645 (2000)). To disrupt thyA gene, a thyA gene knockout cassette was constructed by overlapping PCR. This cassette contains a Kanamycin resistance (Kan^{R}) cassette flanked by two I-SceI cut site, and homologous regions on both the 5′ end (345 bp) and 3′ end (332 bp) to facilitate recombination. Immediately 5′ of the Kan^{R} cassette there is 75 bp of DNA sequence that is perfectly homologous to 75 bp on the 3′ of the Kan^{R} cassette. This repeat element (thyA NMA) leaves a scarless deletion upon excision of the Kan^{R} cassette.

[1562] Specifically, with reference to the sequences in the table below, the thyA left homology arm sequence was amplified from YS1646 using primers thya-1 and thya-2, was PCR overlapped with a Kan^{R} cassette using primers thya-1 and scFv-thyA right homology arm sequence amplified from YS1646 using primer thya-3 and thya-4, was PCR overlapped with thyA NMA (prepared as a synthetic gBlock gene fragment from a supplier (IDT) using primer loxp-4 and thya-4).

TABLE 3
thyA gene KO homology arm length information

Homology arm length

| Gene name | LHA | RHA |
|---|---|---|
| thyA (SEQ ID | 345 bp (PCR amplified | 332 bp (PCR amplified |
| NO: 464_{—} | from VNP20009) | from VNP20009) |

TABLE 4
thyA KO primer sequence information

| | | | | SEQ ID |
|---|---|---|---|---|
| Gene | Primer | Primer sequence | Primer description | NO. |
| thyA | thya-1 | ccttcccagttgtatgagttggc | Forward primer amplifying thyA | 471 |
| | | | LHA and KO cassette | |
| | thya-2 | CTGTTATCCCTAgaagcagctccagc | Reverse primer amplifying thyA | 472 |
| | | ctacacctgtgtgccttcatccagca | LHA | |
| | thya-3 | gatgaaggcacacagtgaaattgaaggc | Forward primer amplifying thyA | 473 |
| | | tatgatccgcac | RHA | |
| | thya-4 | gttgccagccataaagtcctgtg | Reverse primer amplifying thyA | 474 |
| | | | RHA and KO cassette | |
| | thya-5 | ccatgctctttcctggctca | fwd primer checking thyA KO | 475 |
| | thya-6 | ctgacaaagcaccatgaaccg | rev primer checking thyA KO | 476 |
| | FRT-3 | gtgtaggctggagctgcttc | Fwd primer amplifying Kan gene | 477 |
| | | | cassette | |
| | loxp-4 | ggcttcccaaccttaccagag | Fwd primer for overlapping thyA | 478 |
| | | | MHA and RHA | |
| | scFv-3 | cataatctgggtccttggtctgc | Reverse primer for amplifying | 223 |
| | | | Kan gene cassette and for | |
| | | | overlapping Kan gene cassette | |
| | | | with thyA LHA | |

>thyA MHA gBlock fragment
Note:
thyA KO middle homology arm (ggcttcccaaccttaccagagggcgccccagctggcaattccgGGTACCggcaagTAGGGATAACAGGGTAA
TgttaTCTGCAgaccaaggacccagattatgcagcaacacgtttcctgaggaaccatgaaacagtatttagaactgatgcaaaaagtgctggatgaaggca
cacagtgaaattgaaggctatgatccgcac; SEQ ID NO: 479) was used for the lambda red recombination step during Kan gene removal using I-SceI.

[1563] The full length thyA gene knockout cassette then was constructed by overlap PCR using primers thya-land thya-4 (see above Table), gel purified, and introduced into strain YS1646Δasd/ΔFLG/ΔpagP/ΔansB/ΔcsgD/F-ΔpurI carrying the temperature sensitive lambda red recombination plasmid pSL0304 by electroporation. The kanamycin resistance gene then was cured by I-SceI/lambda red mediated recombination as previously described Yang and Yang (Applied and Environmental Microbiology, 80: 3826-3834 (2014)), and the temperature-sensitive plasmids were cured by growth at non-permissive temperature. The thyA gene fragment knockout sequence was confirmed by PCR using primers thya-5 and thya-6 (Table 2), and verified by DNA sequencing. The resulting mutant derivative of parental strain, YS1646Δasd/ΔFLG/ΔpagP/ΔansB/ΔcsgD/F-ΔpurI, was designated YS1646Δasd/ΔFLG/ΔpagP ΔansB ΔcsgD/F-ΔpurI ΔthyA.

[1564] Thymidine deletion strains were grown in a DasGip fermentation system supplemented with 250 μg/mL thymidine for 6 hours and culture material was subsequently processed for injection stocks. YS1646Δasd/ΔFLG/ΔpagP ΔansB ΔcsgD/F-ΔpurI ΔthyA was cultured in the presence of 250 μg/mL thymidine (Sigma Aldrich T1895-1G) and 50 μg/mL diaminopimelic acid to generate electrocompetent cells. YS1646Δasd/ΔFLG/ΔpagP ΔansB ΔcsgD/F-ΔpurI ΔthyA was transformed with plasmids ADN-86, ADN-870 or ADN-872 (see table below), to generate strains STST-321, STST-326 and STST-328, respectively. YS1646Δasd/ΔFLG/ΔpagP/ΔansB/ΔcsgD/F-ΔpurI/ΔthyA strains, designated STST-321, STST-326 and STST-328 containing the noted plasmids (see Table below), were grown in a DasGip fermentation system at 1L scale for 6 hrs in the presence of 250 μg/mL thymidine in parallel with CRST-2000, YS1646Δasd/ΔFLG/ΔpagP/ΔansB/ΔcsgD/F-ΔpurI bearing plasmid ADN-838, in the absence of thymidine supplementation.

| | | |
|---|---|---|
| STST-321 | ADN- | Purl del-CsgD-ThyA-pATI1.76 MTL EMCV IRES |
| | 865 | Ovalbumin-SIY Myc HPRE bGHpA-ADN-865 |
| STST-326 | ADN- | Purl del-CsgD-ThyA-pATI1.76 MTL EMCV IRES |
| | 870 | tPA leader 4xSIINFEKYL HPRE bGHpA-ADN-870 |
| STST-328 | ADN- | Purl del-CsgD-ThyA-pATI1.76 MTL tPA leader |
| | 872 | 4xSIINEEKYL HPRE bGHpA-ADN-872 |
| CRST- | ADN- | Purl del-CsgD-pATI2.1 CMV VCIP IRES huIL- |
| 2000 | 838 | 15cplex T2A hSTINGtCTT N154S + R284G HPRE |
| | | bGHpA-ADN-838 |

Fermentation culture was analyzed for OD₆₀₀ throughout the fermentation. The growth of the thymidine deletion strains were observed to be comparable to the CRST-2000 control. To confirm thymidine auxotrophy, growth of strains STST-321, STST-326 and STST-328 was evaluated in medium with or without 250 μg/mL thymidine supplementation in comparison to control CRST-2000. Injection stocks were thawed at room temperature and 2.5 μL was used to inoculate 250 μL media+/−thymidine in triplicate wells in a clear bottom 96-well plate; growth was evaluated for 12 hours, shaking at 37° C., by OD600 in a SpectraMax® microplate reader (Molecular Devices). Thymidine deletions strains were grown in broth with or without 250 μg/mL thymidine supplementation, and OD₆₀₀ was monitored in 15 minutes intervals over the course of 12 hours.

[1565] The results show that no growth was observed for STST-321, STST-326 and STST-328 in the absence of thymidine supplement, while CRST-2000 demonstrated robust growth to stationary phase. In the presence of 250 μg/mL thymidine supplementation, STST-321, STST-326 and STST-328 grew to stationary phase with a growth profile similar to CRST-2000, demonstrating precise and controlled auxotrophy for thymidine.

### Example 40

### Optimized Expression of IRF3, IFNα2, and IFN-β Expression Cassettes

[1566] Plasmids containing combinations of human IRF3 S396D or mouse IRF3 S388D, or human or mouse IFNα2, or human or mouse IFN-β, where the bi-cistronic constructs contain T2A peptides, were tested for expression of each encoded payload/product against single expresser controls.

[1567] HEK293T STING Null Cells (293-Dual™ Null Cells; InvivoGen), which do not contain endogenous STING, and express secreted embryonic alkaline phosphatase (SEAP), placed under the control of the endogenous IFN-stimulated response element (ISRE) promoter, where the coding sequence of ISRE is replaced by the SEAP ORF using knock-in technology, were used. STING activity, thus, is assessed by monitoring type I IFN induced SEAP production. The 293-Dual™ Null cells also express Lucia™ luciferase, a secreted luciferase, placed under the control of the endogenous IFN-β promoter; the coding sequence of IFN-β has been replaced by the Lucia™ luciferase ORF using knock-in technology. This allows for the assessment of STING activity by monitoring the expression of IFN-β. Using these cells, STING activity can be assessed by monitoring ISRE-induced SEAP production and/or IFN-β-dependent expression of Lucia™ luciferase. The two reporter proteins, SEAP and Lucia™ Luciferase, can be measured in the cell supernatant using standard assays and detection reagents, such as the QUANTI-Blue™ and QUANTI-Luc™ detection reagents (InvivoGen), respectively.

[1568] The cells were seeded in 24-well plates coated with poly-L-lysine at 200,000 cells per well, and incubated overnight at 37° C. in a 5% CO₂ incubator, to achieve 80% confluency. The following day, 300 ng of each plasmid DNA, and 40 ng of a CMV-GFP vector (i.e., a vector encoding green fluorescent protein under the control of a CMV promoter), were diluted in serum-free media and added to FuGENE® transfection reagent (Promega), at the proper reagent:DNA ratios, with untransfected wells serving as negative controls (in duplicates). Cell culture supernatants from each sample were collected 48 hours post-transfection.

[1569] The activity of the constructs were evaluated using the ISRE-SEAP and IFN-β-Lucia™ reporter systems. The type I interferon (IFN) activity was assessed by monitoring type I IFN-stimulated SEAP production in the cell supernatants. 20 μL of cell culture supernatant was added to 180 μL of QUANTI-Blue™ reagent (InvivoGen), which is used for measuring SEAP. Type I interferon activation was determined by measuring ISRE-induced SEAP activity on a SpectraMax® M3 Spectrophotometer (Molecular Devices), at an absorbance wavelength of 650 nm. The type I interferon (IFN) activity also was assessed by monitoring the type I IFN-stimulated Lucia™ luciferase production in the cell supernatants. 20 μL of cell culture supernatant was added to 50 μL of QUANTI-Luc™ reagent (InvivoGen), which is used for measuring Lucia™ luciferase activity. Type I interferon activation was determined by measuring IFNβ-induced Lucia™ luciferase activity on a SpectraMax® M3 Spectrophotometer (Molecular Devices), on the luminescence setting.

[1570] A. Cytokines Resulting from Transfection of Mouse IRF3, IFNα2, and IFNb in BMDCs

[1571] Various single expressing plasmids and combination plasmids containing mouse IRF3 S388D, mouse IFNα2, mouse IFN-β were compared to the hSTING N154S/R284G tazCTT plasmid. The expression results are provided in the table below. ISRE-SEAP reporter activity is higher than hSTING N154S/R284G tazCTT in all of the human constructs, as well as mIFNα2 T2A mIRF3 S388D and mIRF3 S388D T2A mIFNα2. IFNβ-Lucia reporter activity is higher than hSTING N154S/R284G tazCTT for the phosphomimetic hIRF3 alone, hIFNα2 T2A hIRF3 S388D and hIRF3 S388D T2A hIFNα2. These results demonstrate high levels of type I FN production can be induced through expressing individual type I N signaling components, as well as combinations of constitutive type I IFN signaling components.

### Mouse and Human IRF3, IFNα2, and IFN-β Expression Normalized by Transfection Efficiency

| | ISRE-SEAP | | IFNβ-Lucia | |
|---|---|---|---|---|
| | (Absorbance/% GFP) | | (Luminesence/% GFP) | |
| | Mean | ±SD | Mean | ±SD |
| Untransfected | ND | ND | ND | ND |
| 1.76 CMV | 0.0228583 | 0.00085119 | 11.2064602 | 0.45461337 |
| huSTING | | | | |
| tazCTT DM | | | | |
| 1.76 CMV | 0.03989167 | 0.00145511 | 0.32920588 | 0.28396577 |
| mIFNα2 | | | | |
| 1.76 CMV | ND | ND | ND | ND |
| mIFN-β | | | | |
| 1.76 CMV | 0.01381649 | 0.00062722 | 5.20826023 | 0.36717461 |
| mIRF3 | | | | |
| S388D | | | | |
| 1.76 CMV | 0.01767895 | 0.00052589 | ND | ND |
| mIFNα2 | | | | |
| T2A mIFN-β | | | | |
| 1.76 CMV | 0.02566539 | 0.00030503 | 6.64847586 | 1.66829016 |
| muIFNa2 | | | | |
| T2A muIRF3 | | | | |
| S388D | | | | |
| 1.76 CMV | 0.03512478 | 0.0016182 | 6.37450819 | 1.35199207 |
| muIRF3 | | | | |
| S388D T2A | | | | |
| muIFNα2 | | | | |
| 1.76 CMV | 0.05600093 | 0.0009781 | 0.8808781 | 0.67044592 |
| huIFNα2 | | | | |
| 1.76 CMV | 0.03945822 | 0.00031064 | 42.716536 | 4.91527029 |
| huIRF3 | | | | |
| S396D | | | | |
| 1.76 CMV | 0.06714092 | 0.00393377 | 1.86574208 | 0.47553008 |
| huIFN-β | | | | |
| 1.76 CMV | 0.05854426 | 0.00151915 | 1.00891248 | 0.73015436 |
| huIFNα2 | | | | |
| T2A huIFN-β | | | | |
| 1.76 CMV | 0.06245151 | 0.0015994 | 18.8868229 | 2.54040139 |
| huIFNα2 | | | | |
| T2A huIRF3 | | | | |
| S396D | | | | |
| 1.76 CMV | 0.06495505 | 0.00023288 | 18.8039985 | 3.32761255 |
| huIRF3 | | | | |
| S396D T2A | | | | |
| huIFNα2 | | | | |

[1573] B. Plasmids containing combinations of human IRF3 S396D or mouse IRF3 S388D, or human or mouse IFNα2, or human or mouse IFN-β, and combinations thereof, where the bi-cistronic constructs contain T2A peptides, were tested for expression by transfection in murine primary bone marrow-derived dendritic cells (BMDCs).

[1574] To test these, Golden Ticket murine bone marrow was isolated and flushed into 1.5 mL Eppendorf tubes, and spun at 1200 RPM for 5 minutes, to collect the bone marrow cells. Cells were washed once in RPMI-1640+10% FBS, then seeded in 96-well TC-treated plates in RPMI-1640+10% FBS with 20 ng/ml GM-CSF. After four days, non-adherent cells were pipetted off the wells and re-seeded at 2e5 cells per well in RPMI-1640+10% FBS in a 96-well plate for transfection. Cells were transfected using Viromer® RED, according to the manufacturer's instructions. Briefly, 300 ng of plasmid DNA, as well as a “No DNA” control, were diluted in the provided buffer, and mixed with 0.08 μL of Viromer® RED and incubated at room temperature for 15 minutes to allow the DNA/Viromer® RED complexes to form. The DNA/Viromer® RED complexes were then slowly added to each well of the 96-well plate (in duplicates), and the plate was incubated at 37° C. in a CO₂ incubator. Supernatants were harvested at 48 hours, and assayed for murine IFNα, IFN-β, CXCL10 (IP-10), and IL-6 using a flow cytometry-based cytokine bead array (CBA), according to the manufacturer's protocol.

[1575] Various single expressing plasmids and combination plasmids encoding mouse IRF3 S388D, mouse IFNα2, mouse IFN-β were compared to the hSTING N154S/R284G tazCTT plasmid. As shown in the table below, transfections with constructs mIFNα2, mIFN-β, and mIFNα2 T2A mIFN-β had higher levels of IFN-α and IFN-β than hSTING N154S/R284G tazCTT. mIFN-β and mIFNα2 T2A mIFN-β constructs had higher levels of CXCL10 than hSTING N154S/R284G tazCTT. mIRF3 S388D, mIFNα2 T2A mIRF3 S388D, and mIRF3 S388D T2A mIFNα2 constructs all had lower IL-6 levels than hSTING N154S/R284G tazCTT. These data demonstrate the ability to induce type I IFN signaling through multiple combinations of expressed type I IFN components, alone and in combination, and with minimal induction of pro-inflammatory IL-6. Expression of IFN-β alone induces the highest type I IFN activity of all the targets tested.

Cytokines Resulting from Transfection of Mouse IRF3, IFNα2, and IFN-β in BMDCs

| | IFN-α | | IFN-β | | CXCL10 | | IL-6 | |
|---|---|---|---|---|---|---|---|---|
| | Mean | ±SD | Mean | ±SD | Mean | ±SD | Mean | ±SD |
| No DNA | 3.38 | 1.99 | 5.18 | 1.85 | 34.05 | 0.78 | 5.74 | 1.86 |
| huSTING tazCTT | 72.07 | 26.35 | 62.18 | 13.68 | 7199.95 | 1468.73 | 183.82 | 50.88 |
| N154S + R284G | | | | | | | | |
| mIFNα2 | 99.91 | 21.01 | 62.48 | 9.97 | 5524.30 | 303.77 | 174.86 | 39.07 |
| mIFN-β | 91.95 | 44.55 | 190.12 | 13.94 | 8178.50 | 1917.96 | 191.92 | 14.28 |
| mIRF3 S388D | 33.36 | 3.19 | 30.42 | 0.88 | 2428.30 | 414.51 | 90.29 | 12.83 |
| mIFNα2 T2A | 72.84 | 12.10 | 77.70 | 3.78 | 5226.50 | 795.07 | 202.70 | 17.23 |
| mIFN-β | | | | | | | | |
| muIFNα2 T2A | 20.82 | 6.37 | 21.49 | 3.13 | 2077.50 | 356.38 | 95.41 | 10.88 |
| muIRF3 S388D | | | | | | | | |
| muIRF3 S388D | 43.72 | 15.15 | 32.72 | 3.39 | 3187.75 | 9.12 | 134.63 | 0.66 |
| T2A muIFNα2 | | | | | | | | |

[1576] C. Mouse IFNα2 T2A IFN-β is Expressed in vivo in a Murine Orthotopic Breast Cancer Model

[1577] For this experiment, 6-8 week-old female BALB/c mice (5 mice per group) were inoculated in the left mammary fat pad with EMT6 tumor cells (ATCC #CRL-2755) (1×10⁶ cells in 100 μL PBS). Mice bearing 9 day-old established mammary tumors (˜100 mm³ in volume) were IV injected with a single dose of 2×10⁷ CFUs of the YS1646Δasd/ΔFLG/ΔpagP/ΔansB/ΔcsgD/ΔpurI_{(large clean)} strain containing a bicistronic plasmid encoding mIFNα2 T2A mIFN-β, and compared to PBS control.

[1578] The level of tumor mIFNα2 and mIFN-β expression, relative to actin, was determined in order to assess tumor-specific payload delivery. On day 4 post-IV injection, tumors were excised and processed for RNA extraction using the TissueLyser II (Qiagen) in 1.2 mL of RLT plus lysis buffer. The homogenates were collected for RNA isolation using the RNeasy® Plus Mini Kit (Qiagen), according to the manufacturer's instructions. Total RNA concentration was measured using a NanoDrop™ 2000 UV-Vis Spectrophotometer (Thermo Scientific). The purity of each sample also was assessed from the A₂₆₀/A₂₃₀ absorption ratio. Synthesis of cDNA was performed from 0.5-1 μg of template RNA using a CFX96™ Real-Time System (Bio-Rad) and iScript™ gDNA Clear cDNA Synthesis Kit (Bio-Rad) in a 20 μL reaction, according to the manufacturer's instructions. qPCR was performed with a CFX96 Real-Time System (Bio-Rad). PrimePCR™ Probe Assay for mIFNα2 (qMmuCEP0043629), mIFNβ1 (qMmuCEP0058870) were purchased from Bio-Rad. The qPCR reaction (20 μL) was conducted per protocol, using either the SsoAdvanced Universal SYBR Green Supermix or the iQ Multiplex Powermix (Bio-Rad). The standard thermocycling program on the Bio-Rad CFX96 Real-Time System consisted of a 95° C. denaturation for 150 sec, followed by 39 cycles of 95° C. for 15 sec and 60° C. for 55 sec. Quantification of the target mRNA was normalized using Actin reference mRNA (Bio-Rad, qMmuCEP0039589). ΔC_{q} was calculated as the difference between the target and reference gene.

[1579] The values are shown in the table below, as the average of five mice (PBS group) or three mice (mIFNα2+mIFN-β group). Compared to the PBS control group, YS1646Δasd/ΔFLG/ΔpagP/ΔansB/ΔcsgD/ΔpurI_{(large clean)} strain containing plasmids encoding mIFNα2 and mIFN-β significantly increased expression of mIFNα2 and mIFN-β genes in EMT6 tumors.

Ave Fold Expression
Relative to PBS Control

| Treatments | IFNα2 | IFNβ1 |
|---|---|---|
| YS1646Δasd/ΔFLG/ΔpagP/ | 5.37E+03 | 7.60E+00 |
| ΔansB/ΔcsgD/ΔpurI_{(large clean)} | | |
| strain + mIFNα2 + mIFN-β | | |

[1580] In order to measure plasmid delivery to the tumor, and subsequent heterologous gene expression and protein secretion, the amount of mIFNα2 and mIFN-β protein was measured in these tumors. For this, lysates were harvested from homogenized tumors and assessed for protein expression using a flow cytometry-based cytokine bead array (CBA), according to the manufacturer's protocol.

[1581] As shown in the table below, the YS1646Δasd/ΔFLG/ΔpagP/ΔansB/ΔcsgD/ΔpurI_{(large clean)} strain containing plasmids encoding mIFNα2 and mIFN-β demonstrated high levels of mIFNα2 and mIFN-β protein per gram of tumor, as compared to the PBS control tumors, demonstrating potent delivery of mIFNα2 and mIFN-β into tumors following IV administration.

pg/ml per gram of tumor

| treatments | IFNα2 | IFN-β |
|---|---|---|
| PBS | 20497.6 ± 6249 | 75.8 ± 21 |
| YS1646Δasd/ΔFLG/Δpag/ | 37538.5 ± 3843 | 307.7 ± 49 |
| ΔansB/ΔcsgD/ΔpurI_{(larrge clean)} | | |
| strain + mIFNα2 + mIFN-β | | |

### Example 41

### Expression of Membrane Bound Human and Mouse IL-12 in Mouse and Human Cells

[1582] Mouse membrane bound IL-12p70 (SEQ ID NO:466) was constructed with mouse IL-12p40 (residues 3009-4010 of SEQ ID NO:399) followed by a 15 amino acid linker (SEQ ID NO:480; GGGGSGGGGSGGGGS), and IL-12p35 (residues 4056-4634 of SEQ ID NO:399). The transmembrane and cytosolic portions of murine CD80 (SEQ ID NO:481; PPEDPPDSKNTLVLFGAGFGAVITVVVIVVIIKCFCKHRSCFRRNEASRETNNS LTFGPEEALAEQTVFL) follow this sequence. Human membrane bound IL-12p70 (SEQ ID NO:467) was constructed with human IL-12p40 (SEQ ID NO: 482; MCHQQLVISWFSLVFLASPLVAIWELKKDVYVVELDWYPDAPGEMVVLTCD TPEEDGITWTLDQSSEVLGSGKTLTIQVKEFGDAGQYTCHKGGEVLSHSLLLL HKKEDGIWSTDILKDQKEPKNKTFLRCEAKNYSGRFTCWWLTTISTDLTFSV KSSRGSSDPQGVTCGAATLSAERVRGDNKEYEYSVECQEDSACPAAEESLPIE VMVDAVHKLKYENYTSSFFIRDIIKPDPPKNLQLKPLKNSRQVEVSWEYPDT WSTPHSYFSLTFCVQVQGKSKREKKDRVFTDKTSATVICRKNASISVRAQDR YYSSSWSEWASVPCS) followed by a 15 amino acid linker sequence (GGGGSGGGGSGGGGS, SEQ ID NO: 480) and human IL-12p35 (RNLPVATPDPGMFPCLHHSQNLLRAVSNMLQKARQTLEFYPCTSEEIDHEDI TKDKTSTVEACLPLELTKNESCLNSRETSFITNGSCLASRKTSFMMALCLSSIY EDLKMYQVEFKTMNAKLLMDPKRQIFLDQNMLAVIDELMQALNFNSETVPQ KSSLEEPDFYKTKIKLCILLHAFRIRAVTIDRVMSYLNAS, SEQ ID NO:483). The transmembrane and cytosolic portions of human CD80 (SEQ ID NO:484; DNLLPSWAITLISVNGIFVICCLTYCFAPRCRERRRNERLRRESVRPV) follow this sequence.

[1583] HEK cells were seeded in 24-well plates coated with poly-L-lysine at 200,000 cells per well, and incubated overnight at 37° C. in a 5% CO₂ incubator, to achieve 80% confluency. The following day, 300 ng of each plasmid DNA, and 40 ng of a CMV-GFP vector (i.e., a vector encoding green fluorescent protein under the control of a CMV promoter), were diluted in serum-free media and added to FuGENE® transfection reagent (Promega), at the proper reagent:DNA ratio, with untransfected wells serving as negative controls (in duplicates). Cell culture supernatants from each sample were collected 48 hours post-transfection.

[1584] The activity of the constructs were evaluated using a co-culture of transfected HEK cells with HEK-Blue IL-12 (InvivoGen) cells. 24 hours post transfection, 5e4 HEK cells were detached and seeded in a 96-well TC plate. Additionally, 5e4 HEK-Blue IL-12 cells were seeded in the same wells. 48 hours post transfection, cell culture supernatants from each sample were collected 48 hours post-transfection. Human and mouse IL-12 bioactivity was determined by measuring the SEAP reporter, which measures activation of the STAT-4 pathway downstream of IL-12 binding to its receptor. IL-12 bioactivity was determined by measuring ISRE-induced SEAP activity on a SpectraMax® M3 Spectrophotometer (Molecular Devices), at an absorbance wavelength of 650 nm.

[1585] The expression results of the constructs are provided in the table below. Each of the murine and human membrane bound IL-12p70 activated the STAT4-SEAP reporter in HEK-Blue IL-12 cells to at least the same extent as soluble murine and human IL-12p70, thereby confirming the functionality of constructs.

### Mouse and Human Membrane Bound IL-12p70 Expression Normalized by Transfection Efficiency

STAT4-SEAP
(Absorbance/% GFP)

| | Mean | ±SD |
|---|---|---|
| Untransfected | ND | ND |
| muIL-12p70 | 0.1104 | 0.0024 |
| huIL-12p70 | 0.1098 | 0.0031 |
| muIL-12p70.B7 | 0.1166 | 0.0005 |
| huIL-12p70.B7 | 0.2368 | 0.0057 |

[1587] Membrane bound IL-12p70 constructs were tested for expression on the surface of transfected HEK cells by flow cytometry. HEK wildtype cells transfected with murine or human IL-12p70, using the same conditions as above, and were harvested 48 hours post transfection. Cells were detached by PBS and seeded in wells of a V-bottom 96-well plate. The cells were washed once with PBS+2% FBS by centrifugation at 1300 RPM for 3 minutes. The cells were then resuspended in 50 uL PBS+2% FBS containing either anti-human IL-12p70 APC (Miltenyi) diluted 1:10 or anti-mouse IL-12p70 APC (Miltenyi) diluted 1:10, and incubated on ice for 30 minutes in the dark. The cells were washed twice with PBS+2% FBS by centrifugation at 1300 RPM for 3 minutes and resuspended in DAPI diluted 1:6000 in PBS+2% FBS. Flow cytometry data were acquired using the ACEA NovoCyte® flow cytometer (ACEA Biosciences, Inc.), and analyzed using the FlowJo™ software (Tree Star, Inc.). Only 1.67% of untransfected cells were APC positive, while the membrane bound human IL-12p70 was 40.4% positive and the membrane bound murine IL-12p70 was 59.9%. Therefore, these membrane bound IL-12 constructs are well expressed on human cells.

[1588] Plasmids containing human or murine membrane bound IL-12p70 were tested for expression by transfection in murine primary bone marrow-derived dendritic cells (BMDCs). Wild type murine bone marrow was isolated and flushed into 1.5 mL Eppendorf tubes, and spun at 1200 RPM for 5 minutes, to collect the bone marrow cells. Cells were washed once in RPMI-1640+10% FBS, then seeded in 96-well TC-treated plates in RPMI-1640+10% FBS with 20 ng/ml GM-CSF. On Day 3, additional RPMI-1640+10% FBS with 20 ng/ml GM-CSF was added to the cells. After six days, non-adherent cells were pipetted off the wells and re-seeded at 2e5 cells per well in RPMI-1640+10% FBS in a 96-well plate for transfection. Cells were transfected using Viromer® RED transfection reagent, according to the manufacturer's instructions. Briefly, 300 ng of plasmid DNA, as well as a “No DNA” (transfection reagent only) control, were diluted in the provided buffer, and mixed with 0.08 μL of Viromer® RED transfection reagent and incubated at room temperature for 15 minutes to allow the DNA/Viromer® RED complexes to form. The DNA/Viromer® RED complexes were then slowly added to each well of the 96-well plate (in duplicates), and the plate was incubated at 37° C. in a CO₂ incubator. Cells were harvested 48 hours post transfection and were assayed for IL-12 surface expression using flow cytometry.

[1589] The cells were washed once with PBS+2% FBS by centrifugation at 1300 RPM for 3 minutes. The cells were then resuspended in 50 μL PBS+2% FBS containing either anti-human IL-12p70 APC (Miltenyi) diluted 1:10 or anti-mouse IL-12p70 APC (Miltenyi) diluted 1:10, CD11b PE diluted 1:200, ClassII APC-Cy7 diluted 1:200, and incubated on ice for 30 minutes in the dark. The cells were washed twice with PBS+2% FBS by centrifugation at 1300 RPM for 3 minutes and resuspended in DAPI stain diluted 1:6000 in PBS+2% FBS. Flow cytometry data were acquired using the ACEA NovoCyte® flow cytometer (ACEA Biosciences, Inc.), and analyzed using the FlowJo™ software (Tree Star, Inc.). In the dendritic cell population, only 0.205%±0.021% of untransfected cells and 0.685%±0.262% of VCIP IRES CMV NanoLuc transfected cells were APC positive while the membrane bound human IL-12p70 was 6.14%±1.27% positive and the membrane bound murine IL-12p70 was 2.64%±0.87% positive. These results show that the membrane bound IL-12 constructs were detected on the surface of mouse bone marrow dendritic cells above background.

[1590] Plasmids containing murine membrane bound IL-12p70 also were tested for expression by transfection in murine primary bone marrow-derived macrophages (BMMs). Wild type murine bone marrow was isolated and flushed into 1.5 mL Eppendorf tubes, and spun at 1200 RPM for 5 minutes, to collect the bone marrow cells. Cells were washed once in RPMI-1640+10% FBS, then seeded in 24-well TC-treated plates in RPMI-1640+10% FBS with 20 ng/ml M-CSF. After three days, media was aspirated and replenished with 20 ng/ml M-CSF. Cells were transfected using Viromer® RED transfection reagent, according to the manufacturer's instructions. Briefly, 750 ng of plasmid DNA, as well as a “No DNA” control, were diluted in the provided buffer, and mixed with Viromer® RED transfection reagent and incubated at room temperature for 15 minutes to allow the DNA/Viromer® RED complexes to form. The DNA/Viromer® RED complexes were then slowly added to each well of the 96-well plate (in duplicates), and the plate was incubated at 37° C. in a CO₂ incubator. Cells were harvested 48 hours post transfection and were detached for IL-12 surface expression using flow cytometry.

[1591] The cells were detached with 10 mM EDTA and washed once with PBS+2% FBS by centrifugation at 1300 RPM for 3 minutes. The cells were then resuspended in 50 uL PBS+2% FBS containing either anti-human IL-12p70 APC (Miltenyi) diluted 1:10 or anti-mouse IL-12p70 APC (Miltenyi) diluted 1:10, CD11b PE diluted 1:200, ClassII APC-Cy7 diluted 1:200, and incubated on ice for 30 minutes in the dark. The cells were washed twice with PBS+2% FBS by centrifugation at 1300 RPM for 3 minutes and resuspended in DAPI diluted 1:6000 in PBS+2% FBS. Flow cytometry data were acquired using the ACEA NovoCyte® flow cytometer (ACEA Biosciences, Inc.), and analyzed using the FlowJo™ software (Tree Star, Inc.). Only 0.01%±0.003% of untransfected cells and 0.36%±0.028% of VCIP IRES CMV NanoLuc transfected cells were APC positive while the membrane bound murine IL-12p70 was 1.945%±0.106%. Therefore, these membrane bound IL-12 constructs were detected on the surface of mouse bone marrow macrophages above background.

### Example 42

### Expression of DLL3×CD3 Bispecific T-cell Engagers from Human Cells

[1592] DLL3×CD3 bispecific T-cell engagers (sold under the trademark BiTE®), which targets delta-like ligand 3, which is selectively expressed in small-cell lung cancer, and CD3+ T cells, containing a FLAG tag, were designed using the amino acid sequences of anti-DLL3 antibodies SC16.15, SC16.34, and SC16.56, see e.g., International Patent Publication No. WO 2017/031458 A2. The anti-CD3 arm of this BiTE construct was designed from clone 145-2C11. These antibodies are fully murine sequences cloned into the pATI-1.76 vector under the control of a CMV promoter and with a 3′ HPRE. For human administration, the antibodies can be humanized as appropriate. The sequences were confirmed by Sanger sequencing. The sequence of the resulting constructs are as follows:

### SC16.56 DLL3HL×CD3HL (SEQ ID NO:485)

[1593] The construct includes, in the following order: mouse IgGK leader, SC16.56 VH, 15 amino acid GS linker, SC 16.56 VL, 5 amino acid linker, 145-2C11 VH, 15 amino acid GS linker, 145-2C11 VL, and Flag tag, as set forth in SEQ TD NO: 485, and below:

SC16.56 DLL3LHxCD3HL (SEQ ID NO: 486)

| | |
|---|---|
| METDTLLLWVLLLWVPGSTGD | mouse IgGK |
| | leader |
| QIQLVQSGPELKKPGETVKISCKASGYTFTNYGM | SC16.56 VH |
| NWVKQAPGKGLKWMAWINTYTGEPTYADDFKG | |
| RFAFSLETSASTASLQIINLKNEDTATYFCARIGDS | |
| SPSDYWGQGTTLTVSS | |
| GGGGSGGGGSGGGGS | 15 amino acid |
| | GS linker |
| SIVMTQTPKFLLVSAGDRVTITCKASQSVSNDVVW | SC16.56 VL |
| YQQKPGQSPKLLIYYASNRYTGVPDRFAGSGYGTD | |
| FSFTISTVQAEDLAVYFCQQDYTSPWTFGGGTKLEIR | |
| GGGGS | 5 amino acid |
| | GS linker |
| EVQLVESGGGLVQPGKSLKLSCEASGFTFSGYGM | 145-2C11 VH |
| HWVRQAPGRGLESVAYITSSSINIKYADAVKGRFT | |
| VSRDNAKNLLFLQMNILKSEDTAMYYCARFDWD | |
| KNYWGQGTMVTVSS | |
| GGGGSGGGGSGGGGS | 15 amino acid |
| | GS linker |
| DIQMTQSPSSLPASLGDRVTINCQASQDISNYLNW | 145-2C11 VL |
| YQQKPGKAPKLLIYYTNKLADGVPSRFSGSGSGRD | |
| SSFTISSLESEDIGSYYCQQYYNYPWTFGPGTKLEIK | |
| DYKDDDDK | Flag tag |

[1594] The construct includes, in the following order: mouse IgGK leader, SC16.56 VL, 15 amino acid GS linker, SC 16.56 VH, 5 amino acid linker, 145-2C11 VH, 15 amino acid GS linker, 145-2C11 VL, and Flag tag, as set forth in SEQ TD NO: 486, and below:

SC16.15 DLL3HLxCD3HL (SEQ ID NO: 487)

| | |
|---|---|
| METDTLLLWVLLLWVPGSTGD | mouse IgGK leader |
| SIVMTQTPKFLLVSAGDRVTITCKASQSVSNDVVW | SC16.56 VL |
| YQQKPGQSPKLLIYYASNRYTGVPDRFAGSGYGTD | |
| FSFTISTVQAEDLAVYFCQQDYTSPWTFGGGTKLEIR | |
| GGGGSGGGGSGGGGS | 15 amino acid GS |
| | linker |
| QIQLVQSGPELKKPGETVKISCKASGYTFTNYGM | SC16.56 VH |
| NWVKQAPGKGLKWMAWINTYTGEPTYADDFKG | |
| RFAFSLETSASTASLQIINLKNEDTATYFCARIGDS | |
| SPSDYWGQGTTLTVSS | |
| GGGGS | 5 amino acid linker |
| EVQLVESGGGLVQPGKSLKLSCEASGFTFSGYGM | 145-2C11 VH |
| HWVRQAPGRGLESVAYITSSSINIKYADAVKGRFT | |
| VSRDNAKNLLFLQMNILKSEDTAMYYCARFDWD | |
| KNYWGQGTMVTVSS | |
| GGGGSGGGGSGGGGS | 15 amino acid GS |
| | linker |
| DIQMTQSPSSLPASLGDRVTINCQASQDISNYLNW | 145-2C11 VL |
| YQQKPGKAPKLLIYYTNKLADGVPSRFSGSGSGRD | |
| SSFTISSLESEDIGSYYCQQYYNYPWTFGPGTKLEIK | |
| DYKDDDDK | Flag tag |

[1595] The construct includes, in the following order: mouse IgGK leader, SC16.15 VH, 15 amino acid GS linker, SC 16.15 VL, 5 amino acid linker, 145-2C11 VH, 15 amino acid GS linker, 145-2C11 VL, and Flag tag, as set forth in SEQ TD NO: 487, and below.

SC16.15 DLL3LHxCD3HL (SEQ ID NO: 488)

| | |
|---|---|
| METDTLLLWVLLLWVPGSTGD | mouse IgGK leader |
| QVQLQQSGAELAKPGASVKMSCKASGYTFTRYWIH | SC16.15 VH |
| WIKQRPGQGLEWIGYINPTTVYTEFNQNFKDKATLT | |
| ADKSSTTASMQLSSLTSEDSAVYYCARGGSNFFDYW | |
| GQGTTLTVSS | |
| GGGGSGGGGSGGGGS | 15 amino acid GS |
| | linker |
| DIQMTQSPASLAASVGETVAITCRASENIYYNLAWY | SC16.15 VL |
| QQKQGKSPQLLIYTANSLEDGVPSRFSGSGSGTQYSL | |
| KINSMQPEDSATYFCKQAYDVPPTFGGGTKLEIK | |
| GGGGS | 5 amino acid linker |
| EVQLVESGGGLVQPGKSLKLSCEASGFTFSGYGM | 145-2C11 VH |
| HWVRQAPGRGLESVAYITSSSINIKYADAVKGRFT | |
| VSRDNAKNLLFLQMNILKSEDTAMYYCARFDWD | |
| KNYWGQGTMVTVSS | |
| GGGGSGGGGSGGGGS | 15 amino acid GS |
| | linker |
| DIQMTQSPSSLPASLGDRVTINCQASQDISNYLNW | 145-2C11 VL |
| YQQKPGKAPKLLIYYTNKLADGVPSRFSGSGSGRD | |
| SSFTISSLESEDIGSYYCQQYYNYPWTFGPGTKLEIK | |
| DYKDDDDK | Flag tag |

[1596] The construct includes, in the following order: mouse IgGK leader, SC16.15 VL, 15 amino acid GS linker, SC 16.15 VH, 5 amino acid linker, 145-2C11 VH, 15 amino acid GS linker, 145-2C11 VL, and Flag tag, as set forth in SEQ TD NO: 488, and below:

SC16.34 DLL3HLxCD3HL (SEQ ID NO: 489)

| | |
|---|---|
| METDTLLLWVLLLWVPGSTGD | mouse IgGK leader |
| DIQMTQSPASLAASVGETVAITCRASENIYYNLAWY | SC16.15 VL |
| QQKQGKSPQLLIYTANSLEDGVPSRFSGSGSGTQYSL | |
| KINSMQPEDSATYFCKQAYDVPPTFGGGTKLEIK | |
| GGGGSGGGGSGGGGS | 15 amino acid GS |
| | linker |
| QVQLQQSGAELAKPGASVKMSCKASGYTFTRYWIH | SC16.15 VH |
| WIKQRPGQGLEWIGYINPTTVYTEFNQNFKDKATLT | |
| ADKSSTTASMQLSSLTSEDSAVYYCARGGSNFFDYW | |
| GQGTTLTVSS | |
| GGGGS | 5 amino acid linker |
| EVQLVESGGGLVQPGKSLKLSCEASGFTFSGYGM | magenta highlight is |
| HWVRQAPGRGLESVAYITSSSINIKYADAVKGRFT | 145-2C11 VH |
| VSRDNAKNLLFLQMNILKSEDTAMYYCARFDWD | |
| KNYWGQGTMVTVSS | |
| GGGGSGGGGSGGGGS | 15 amino acid GS |
| | linker |
| DIQMTQSPSSLPASLGDRVTINCQASQDISNYLNW | 145-2C11 VL |
| YQQKPGKAPKLLIYYTNKLADGVPSRFSGSGSGRD | |
| SSFTISSLESEDIGSYYCQQYYNYPWTFGPGTKLEIK | |
| DYKDDDDK | Flag tag |

[1597] The construct includes, in the following order: mouse IgGK leader, SC16.34 VH, 15 amino acid GS linker, SC16.34 VL, 5 amino acid linker, 145-2C11 VH, 15 amino acid GS linker, 145-2C11 VL, and Flag tag, as set forth in SEQ ID NO: 489, and below:

SC16.34 DLL3LHxCD3HL (SEQ ID NO: 490)

| | |
|---|---|
| METDTLLLWVLLLWVPGSTGD | mouse IgGK leader |
| QIQLVQSGPELKRPGETVKISCKASGYTFTNYGMN | SC16.34 VH |
| WVKQAPGKGLKWMGWINTYTGDPTYADDFKGRF | |
| AFSLETSASTAYLQINNLKNEDTATYFCARIGGNSPS | |
| DYWGQGTSLTVSS | |
| GGGGSGGGGSGGGGS | 15 amino acid GS |
| | linker |
| SIVMTQTPKFLLVSAGDRVTITCKASQSVSNDVAW | SC16.34 VL |
| YQQKPGQSPKLLIYYASNRYSGVPDRFTGSGYGTDF | |
| TFTISTVQAEDLAVYFCQQDYSSPWTFGGGTKLEIK | |
| GGGGS | 5 amino acid linker |
| EVQLVESGGGLVQPGKSLKLSCEASGFTFSGYGM | 145-2C11 VH |
| HWVRQAPGRGLESVAYITSSSINIKYADAVKGRFT | |
| VSRDNAKNLLFLQMNILKSEDTAMYYCARFDWD | |
| KNYWGQGTMVTVSS | |
| GGGGSGGGGSGGGGS | 15 amino acid GS |
| | linker |
| DIQMTQSPSSLPASLGDRVTINCQASQDISNYLNW | 145-2C11 VL |
| YQQKPGKAPKLLIYYTNKLADGVPSRFSGSGSGRD | |
| SSFTISSLESEDIGSYYCQQYYNYPWTFGPGTKLEIK | |
| DYKDDDDK | |

[1598] The construct includes, in the following order: mouse IgGK leader, SC16.34 VL, 15 amino acid GS linker, SC16.34 VH, 5 amino acid linker, 145-2C11 VH, 15 amino acid GS linker, 145-2C11 VL, and Flag tag, as set forth in SEQ ID NO: 490, and below:

| | |
|---|---|
| METDTLLLWVLLLWVPGSTGD | mouse IgGK leader |
| SIVMTQTPKFLLVSAGDRVTITCKASQSVSNDVAW | SC16.34 VL |
| YQQKPGQSPKLLIYYASNRYSGVPDRFTGSGYGTDF | |
| TFTISTVQAEDLAVYFCQQDYSSPWTFGGGTKLEIK | |
| GGGGSGGGGSGGGGS | 15 amino acid GS |
| | linker |
| QIQLVQSGPELKRPGETVKISCKASGYTFTNYGMN | SC16.34 VH |
| WVKQAPGKGLKWMGWINTYTGDPTYADDFKGRF | |
| AFSLETSASTAYLQINNLKNEDTATYFCARIGGNSPS | |
| DYWGQGTSLTVSS | |
| GGGGS | 5 amino acid linker, |
| EVQLVESGGGLVQPGKSLKLSCEASGFTFSGYGM | 145-2C11 VH |
| HWVRQAPGRGLESVAYITSSSINIKYADAVKGRFT | |
| VSRDNAKNLLFLQMNILKSEDTAMYYCARFDWD | |
| KNYWGQGTMVTVSS | |
| GGGGSGGGGSGGGGS | 15 amino acid GS |
| | linker |
| DIQMTQSPSSLPASLGDRVTINCQASQDISNYLNW | 145-2C11 VL |
| YQQKPGKAPKLLIYYTNKLADGVPSRFSGSGSGRD | |
| SSFTISSLESEDIGSYYCQQYYNYPWTFGPGTKLEIK | |
| DYKDDDDK | Flag tag |

[1599] 1.5×10⁶ HEK293T cells were plated one day prior on 6-well plates coated with poly-L-lysine, to achieve 80% confluency. On the day of transfection, 3 μg of DNA was diluted in serum-free media and added to FuGENE® transfection reagent (Promega), at the proper reagent:DNA ratios. Cell culture supernatants from each sample were collected after 48 hours of incubation. Some supernatant was concentrated in a 10 kDa spin column (Millipore).

[1600] The functionality of these cells transfected with the DLL3×CD3 BiTE encoding plasmids was demonstrated by binding of the DLL3×CD3 bispecific T-cell engagers on the cells to SHP77 cells (ATCC), which have DLL3 on the surface. 500,000 SHP77 cells were seeded in wells of a V-bottom 96-well plate. The cells were washed once with PBS+2% FBS by centrifugation at 1300 RPM for 3 minutes. The cells were resuspended in 50 uL PBS+2% FBS containing concentrated HEK supernatant corresponding to either untransfected cells or cells transfected with a BiTE. After 30 minutes, the cells were washed twice with PBS+2% FBS by centrifugation at 1300 RPM for 3 minutes. The cells were then resuspended in 50 uL PBS+2% FBS containing either anti-Flag biotin (Sigma) at 1:100 dilution or Protein L biotin (Genscript) at 1:200 dilution, and incubated on ice for 30 minutes. The cells were washed twice with PBS+2% FBS by centrifugation at 1300 RPM for 3 minutes. Subsequently, the cells were stained with Streptavidin APC (Biolegend) at 1:200 dilution and incubated on ice for 30 minutes in the dark.

[1601] The cells were washed twice with PBS+2% FBS by centrifugation at 1300 RPM for 3 minutes and resuspended in DAPI diluted 1:6000 in PBS+2% FBS. Flow cytometry data were acquired using the ACEA NovoCyte® flow cytometer (ACEA Biosciences, Inc.), and analyzed using the FlowJo™ software (Tree Star, Inc.).

[1602] The table below provides the percent of positive cells gated as APC positive, corresponding to cells stained with BiTE and detected either by Protein L or anti-Flag antibody. SC16.56 DLL3LH×CD3HL, SC16.34 DLL3HL×CD3HL, and SC16.34 DLL3LH×CD3HL BiTEs all have similar detection on SHP77 cells while the other BiTEs are not detected. Therefore, SC16.56 DLL3LH×CD3HL, SC16.34 DLL3HL×CD3HL, and SC16.34 DLL3LH×CD3HL bind to DLL3. Binding of cells expressing the DLL3×CD3 bispecific T-cell engagers DLL SHP77 cells

| | | % Binding | % Binding |
|---|---|---|---|
| | | to SHP77 | to SHP77 |
| | | Detected by | Detected by |
| | | Protein L | anti-Flag |
| Untransfected | Mean (%) | ND | ND |
| SC16.56 DLL3HL × | Mean (%) | ND | ND |
| CD3HL BiTE | | | |
| SC16.56 DLL3LH × | Mean (%) | 36.4 | 20.9 |
| CD3HL BiTE | | | |
| SC16.15 DLL3HL × | Mean (%) | ND | ND |
| CD3HL BiTE | | | |
| SC16.15 DLL3LH × | Mean (%) | ND | ND |
| CD3HL BiTE | | | |
| SC16.34 DLL3HL × | Mean (%) | 36.6 | 19.6 |
| CD3HL BiTE | | | |
| SC16.34 DLL3LH × | Mean (%) | 36.4 | 20.1 |
| CD3HL BiTE | | | |

[1603] The expressed DLL3×CD3 bispecific T-cell engagers also were evaluated for binding to DLL3 and to CD3 with an ELISA. This ELISA was developed to detect correctly folded DLL3×CD3 bispecific T-cell engager binding to DLL3 and CD3 in the same assay. Human DLL3 (R&D Systems) was coated overnight at 4° C. on a high protein-binding 96-well plate, at a concentration of 1 ug/ml. The wells then were washed three times with PBS 0.05% Tween-20, and the wells were blocked with ELISA blocking buffer for 1 hour at room temperature. The wells then were washed three times with PBS 0.05% Tween-20. HEK293T cell culture supernatants, containing the DLL3×CD3 bispecific T-cell engagers, were added to the wells and incubated for 2 hours at room temperature. The wells were washed three times with PBS 0.05% Tween-20, and human IgG Fc conjugated CD3e was added to the wells (Acro Biosystems), and incubated for one hour at room temperature. The wells again were washed three times with PBS 0.05% Tween-20, and horseradish peroxidase (HRP)-conjugated anti-human antibody was added for a 1 hour incubation. The wells were then washed three times with PBS 0.05% Tween-20, and detection reagent (3,3′,5,5′-tetramethylbenzidine (TMB), Thermo Fisher Scientific) was added to the wells. The enzymatic reaction was stopped with sulfuric acid (BioLegend), and the optical densities were read at 450 nm.

[1604] The table below provides the results of this ELISA, shown as the absorbance at 450 nm. All of the SC16.56 DLL3LH×CD3HL, SC16.34 DLL3HL×CD3HL, and SC16.34 DLL3LH×CD3HL BiTE antibodies were detected, showing that these BiTEs antibodies are fully functional. SC16.34 DLL3LH×CD3HL has the highest binding in this ELISA, but since cell supernatants were used in this assay, it is not possible to distinguish whether this results from a higher concentration of this bispecific T-cell engager, or higher affinity to its targets compared to the other 3 bispecific T-cell engagers. In a separate experiment, the bispecific T-cell engagers were purified using ANTI-FLAG M2 Affinity Gel (Sigma) and run on this ELISA. SC16.34 DLL3LH×CD3HL was the only purified BiTE to show ELISA signal above background.

### BiTE Binding by ELISA

Absorbance at 450 nm

| | Mean | ±SD |
|---|---|---|
| Untransfected | 0.010 | 0.001 |
| SC16.56 DLL3HL × CD3HL BiTE | 0.007 | 0.002 |
| SC16.56 DLL3LH × CD3HL BiTE | 0.175 | 0.051 |
| SC16.15 DLL3HL × CD3HL BiTE | 0.002 | 0.001 |
| SC16.15 DLL3LH × CD3HL BiTE | 0.001 | 0.002 |
| SC16.34 DLL3HL × CD3HL BiTE | 0.253 | 0.026 |
| SC16.34 DLL3LH × CD3HL BiTE | 1.458 | 0.089 |

### Example 43

### Anti-CTLA-4 scFv-Fc Demonstrates Blockade of the CD80/CTLA-4 and CD86/CTLA-4 Interactions and Co-Expresses with Human STING N154S/R284G tazCTT

[1606] An scFv-Fc specific for human CTLA-4 (see, SEQ ID NOs:427 and 428 for the nucleic acid and protein sequences, respectively) was designed using the amino acid sequence of ipilimumab. Ipilimumab is a fully human IgG1κ monoclonal antibody that specifically binds human CTLA-4 (see, e.g., the antibody designated 10D1 in U.S. Patent Publication No. 2002/0086014 and in U.S. Pat. No. 6,984,720), blocking CTLA-4's immune inhibiting interaction with CD80 (also known as B7.1 or B7-1) and CD86 (also known as B7.2 or B7-2).

[1607] To generate the ipilimumab scFv antibody fragment (see, SEQ ID NO:429), the variable light chain (V_{L}) and variable heavy chain (V_{H}) of ipilimumab were linked with a 20 amino acid long glycine-serine (GS) linker ((GGGGS)₄). To generate the scFv-Fc antibody fragment (see, SEQ ID NO:428), the variable heavy chain of the ipilimumab scFv was linked to a human IgG1 Fc, containing a mutation of the free cysteine in the hinge region to a serine (at position 272 in SEQ ID NO:428). The leader sequence (METPAQLLFLLLLWLPDTTG; corresponding to residues 1-20 in SEQ ID NO:428) was derived from the sequence of the human immunoglobulin kappa variable 3-20 (IGKV3-20) protein. The sequence was codon optimized for human using the GenScript GenSmart™ Codon Optimization tool (ATGGAGACACCTGCCCAGCTGCTGTTCCTGCTGCTGCTGTGGCTGCCCGA CACCACCGGC); the sequence is set forth in SEQ ID NO:491.

[1608] The neutralizing ability of the anti-CTLA-4 scFv-Fc was determined using competitive ELISAs to measure the ability of the antibody fragment to block the interactions between CTLA-4 and its ligands, CD80 and CD86. HEK293T cells were transfected with 3 micrograms of DNA encoding the anti-CTLA-4 scFv-Fc antibody fragment construct, using the FuGENE® transfection reagent (Promega), at the proper reagent:DNA ratios. Forty-eight hours post-transfection, HEK293T cell-free culture supernatants were harvested, filtered, and used in a competitive ELISA to assess the blockade activity of the anti-CTLA-4 antibody fragment.

[1609] For the competitive ELISAs, human CD80 or CD86 recombinant proteins (R&D Systems) were coated overnight at 4° C. on a high protein-binding 96-well plate, at a concentration of 100 ng/ml. The wells were then washed three times with PBS 0.05% Tween-20, and the wells were blocked with ELISA blocking buffer for 1 hour at room temperature. The wells were then washed three times with PBS 0.05% Tween-20. HEK293T cell culture supernatants, containing each of the anti-CTLA-4 antibody fragments, were mixed with 10 ng/ml of a recombinant human CTLA-4-human IgG1 Fc chimera (R&D Systems), and added to the wells and incubated for 2 hours at room temperature. The wells were then washed three times with PBS 0.05% Tween-20, and horseradish peroxidase (HRP)-conjugated anti-human IgG1 antibody was added to the wells (Jackson ImmunoResearch), and incubated for one hour at room temperature. The wells were then washed three times with PBS 0.05% Tween-20, and detection reagent (3,3′,5,5′-tetramethylbenzidine (TMB), Thermo Fisher Scientific) was added to the wells. The enzymatic reaction was stopped with sulfuric acid (BioLegend), and the optical densities were read at 450 nm.

[1610] The results of the competitive ELISAs are summarized in the table below. The anti-CTLA-4 scFv-Fc blocked the binding of CTLA-4 to CD86 by 94.14% and blocked the binding of CTLA-4 to CD8β by 83.46%. The CTLA4 scFv-Fc had a higher degree of CD86/CTLA-4 blocking activity compared with CD80/CTLA-4 blocking activity.

### Competitive ELISA Results

| | | % CD86 Blockade | % CD80 Blockade |
|---|---|---|---|
| | | Activity | Activity |
| Human Anti- | Mean (%) | 94.14 | 83.46 |
| CTLA-4 scFv-Fc | ±SD | 0.25 | 0.32 |

[1612] Human anti-CTLA4 scFv-Fc (SEQ ID NO:427) was cloned into expression vectors with huSTING N154S/R284G tazCTT either containing or not containing the Vascular Endothelial Growth Factor and Type 1 Collagen Inducible Protein (VCIP) IRES. HEK293T STING Null Cells (293-Dual™ Null Cells; InvivoGen) were used, which do not contain endogenous STING, and express secreted embryonic alkaline phosphatase (SEAP), placed under the control of the endogenous IFN-stimulated response element (ISRE) promoter, where the coding sequence of ISRE is replaced by the SEAP ORF using knock-in technology. STING activity, thus, is assessed by monitoring type I IFN induced SEAP production. The 293-Dual™ Null cells also express Lucia™ luciferase, a secreted luciferase, placed under the control of the endogenous IFN-β promoter; the coding sequence of IFN-β has been replaced by the Lucia™ luciferase ORF using knock-in technology. This allows for the assessment of STING activity by monitoring the expression of IFN-β. Using these cells, STING activity can be assessed by monitoring ISRE-induced SEAP production and/or IFN-β-dependent expression of Lucia™ luciferase. The two reporter proteins, SEAP and Lucia™ Luciferase, can be measured in the cell supernatant using standard assays and detection reagents, such as the QUANTI-Blue™ and QUANTI-Luc™ detection reagents (InvivoGen), respectively.

[1613] The cells were seeded in 24-well plates coated with poly-L-lysine at 200,000 cells per well, and incubated overnight at 37° C. in a 5% CO₂ incubator, to achieve 80% confluency. The following day, 300 ng of each plasmid DNA, and 40 ng of a CMV-GFP vector (i.e., a vector encoding green fluorescent protein under the control of a CMV promoter), were diluted in serum-free media and added to FuGENE® transfection reagent (Promega), at the proper reagent:DNA ratios, with untransfected wells serving as negative controls (in duplicates). Cell culture supernatants from each sample were collected 48 hours post-transfection.

[1614] The STING activity of the huSTING N154S/R284G tazCTT variant was evaluated using the ISRE-SEAP and IFN-β-Lucia™ reporter systems. The type I interferon (IFN) activity (induced by STING) was assessed by monitoring type I IFN-stimulated SEAP production in the cell supernatants. 20 μL of cell culture supernatant was added to 180 μL of QUANTI-Blue™ reagent (InvivoGen), which is used for measuring SEAP. Type I interferon activation was determined by measuring ISRE-induced SEAP activity on a SpectraMax® M3 Spectrophotometer (Molecular Devices), at an absorbance wavelength of 650 nm. The type I interferon (IFN) activity (induced by STING) also was assessed by monitoring the type I IFN-stimulated Lucia™ luciferase production in the cell supernatants. 20 μL of cell culture supernatant was added to 50 μL of QUANTI-Luc™ reagent (InvivoGen), which is used for measuring Lucia™ luciferase activity. Type I interferon activation was determined by measuring IFNβ-induced Lucia™ luciferase activity on a SpectraMax® M3 Spectrophotometer (Molecular Devices), on the luminescence setting.

[1615] Cell culture supernatants also were assessed for the expression of human CTLA4 scFv-Fc. Human CTLA4 (R&D Systems) was coated overnight at 4° C. on a high protein-binding 96-well plate, at a concentration of 1 ug/ml. The wells were then washed three times with PBS 0.05% Tween-20, and the wells were blocked with ELISA blocking buffer for 1 hour at room temperature. The wells were then washed three times with PBS 0.05% Tween-20. HEK293T cell culture supernatants, containing anti-CTLA4 scFv-Fc were added to the wells and incubated for 2 hours at room temperature. The wells were washed three times with PBS 0.05% Tween-20, and horseradish peroxidase (HRP)-conjugated anti-human antibody was added for a 1 hour incubation. The wells were then washed three times with PBS 0.05% Tween-20, and detection reagent (3,3′,5,5′-tetramethylbenzidine (TMB), Thermo Fisher Scientific) was added to the wells. The enzymatic reaction was stopped with sulfuric acid (BioLegend), and the optical densities were read at 450 nm.

[1616] The expression results of the human anti-CTLA4 scFv-Fc+hSTING N154S/R284G tazCTT constructs are shown below. Constructs containing both payloads retained expression of each protein. The human anti-CTLA4 scFv-Fc T2A hSTING N154S/R284G tazCTT construct had better STING activity without the VCIP IRES. Expression of anti-CTLA4 scFv-Fc was higher by ELISA from the construct without VCIP IRES, demonstrating that individual targets can require unique elements for improved expression.

Human anti-CTLA4 scFv-Fc+STING Expression Normalized by Transfection Efficiency

| | | | | | Hu anti-CTLA4 | |
|---|---|---|---|---|---|---|
| | ISRE-SEAP | | IFNβ-Lucia | | scFv-Fc | |
| | (Absorbance/ | | (Luminesence/ | | (Absorbance/ | |
| | % GFP) | | % GFP) | | % GFP) | |
| | Mean (%) | ±SD | Mean (%) | ±SD | Mean (%) | ±SD |
| Untransfected | ND | ND | ND | ND | ND | ND |
| hu anti-CTLA4 scFv-Fc | 0.00006 | 0.00003 | 0.13 | 0.029 | 0.129 | 0.006 |
| VCIP hu anti-CTLA4 | 0.0001 | 0.00008 | ND | ND | 0.080 | 0.009 |
| scFv-Fc | | | | | | |
| huSTING N154S/R284G | 0.095 | 0.005 | 17.567 | 2.859 | ND | ND |
| tazCTT | | | | | | |
| hu anti-CTLA4 scFv-Fc | 0.063 | 0.004 | 6.698 | 0.222 | 0.028 | 0.001 |
| T2A hSTING N154S/R284G | | | | | | |
| tazCTT | | | | | | |
| VCIP hu anti-CTLA4 | 0.050 | 0.005 | 5.213 | 0.191 | 0.017 | 0.00003 |
| scFv-Fc T2A hSTING | | | | | | |
| N154S/R284G tazCTT | | | | | | |

### Example 44

### Bacterial Strain Infection of Macrophages Allows the Presentation of Immunogenic Peptide by MHC-I Molecules

[1617] This Example shows that the bacteria provided herein bactofect antigen presenting cells with either mRNA delivery or plasmid DNA delivery, and the resulting expressed product is presented by antigen presenting cells. The anti-SIINFEKL/H-2Kb antibody, used for this demonstration, binds specifically to the ovalbumin SIINFEKL [SEQ ID NO:492] peptide only when presented by MHC-I (H-2Kb) at the surface of IC21 cells. This demonstrates that the vaccines strains provided herein, such as those that encode STING+IL-15 receptor complex+cancer antigen, can treat immune desert tumors, also can could be used as a cancer vaccine in the neoadjuvant setting, also can be used as a platform to present pathogenic antigens for prophylactic vaccination, and can be used as a treatment for pathogen infection, such as, for example, MRSA, chronic viral hepatitis infection, chronic P. gingivalis, HIV, and other chronic infections, as well as acute infection.

[1618] In demonstrating the above, the experiment in this Example, shows how the infection of antigen-presenting cells by the exemplary strain, designated YS1646Δasd/ΔFLG/ΔpagP/ΔansB/ΔcsgD, leads to presentation of immunogenic peptides by the major histocompatibility complex class-I (MHC-I) to CD8+ T cells. YS1646Δasd/ΔFLG/ΔpagP/ΔansB/ΔcsgD strains encoding the chicken ovalbumin under the eukaryotic CMV promoter and the prokaryotic MTL promoter followed or not with the encephalomyocarditis virus (EMCV) internal ribosome entry site (IRES) were generated. The chicken ovalbumin is a model antigen, and the immune-dominant SIINFEKL peptide derived from the chicken ovalbumin was monitored for its presentation by the murine H-2Kb MHC-I molecules at the surface of antigen-presenting cells. The murine peritoneal macrophages cell line IC21 (ATCC) was used as antigen-presenting cell in the assay.

[1619] Fifty thousand IC21 cells per well of a 96-well flat-bottom plate were seeded in 100 ul RPMI 10% FBS and left in a 37° C. and 5% CO₂ incubator over-night. The next day, IC21 cells were infected with YS1646Δasd/ΔFLG/ΔpagP/ΔansB/ΔcsgD strains containing plasmids encoding the chicken ovalbumin under the regulation of the CMV or MTL promoters. The bacterial strains were added to the cultured cells and the plate was centrifugated at 500 g for 5 minutes at room temperature. Cells were then incubated for 1 h at 37° C. and culture media containing gentamycin was added for a final concentration of 50 ug/ml. Infected cells were left in at 37° C. and 5% CO₂ incubator for seven hours. Seven hours after the infection, IC21 cells were detached using PBS 10 mM EDTA and stained with anti-murine F4/80 APC-conjugated antibodies and anti-SIINFEKL/H-2Kb PE-conjugated antibodies (both from Biolegend), and the data was acquired using the ACEA Novocyte flow-cytometer.

[1620] The anti-SIINFEKL/H-2Kb antibody binds specifically to the ovalbumin SIINFEKL peptide only when presented by MHC-I (H-2Kb) at the surface of IC21 cells. The mean fluorescence intensity for the H-2Kb/SIINFEKL presentation by IC21 cells seven hours post-infection was measured. The results are presented in the table below, which shows the net mean fluorescence intensity (Net MFI) observed in the groups treated with the ovalbumin encoding strains over the uninfected cells.

| | Net Mean Fluorescence Intensity | |
|---|---|---|
| Treatment | over uninfected (Net MFI) | SEM* |
| Uninfected | 0 | NA |
| CMV-Ovalbumin | 606 | 54 |
| MTL-IRES-Ovalbumin | 632 | 3.5 |
| MTL -Ovalbumin | 384.5 | 42 |

*SEM = standard error of the mean

[1621] This Example shows the ability of strains, such as YS1646Δasd/ΔFLG/ΔpagP/ΔansB/ΔcsgD, to deliver antigens that are processed by the antigen-presenting cells and presented to CD8+ T cells upon delivery, to mount a T cell specific response against antigens relevant to or from pathogens or cancer cells.

[1622] Since modifications will be apparent to those of skill in the art, it is intended that this invention be limited only by the scope of the appended claims.

What is claimed:

1. An immunostimulatory bacterium, comprising a plasmid that encodes a therapeutic product, wherein:
the bacterium comprises genome modifications, whereby the bacterium does not produce active thymidylate synthase, and requires supplementation for growth;
the bacterium comprises a plasmid encoding a therapeutic product; and
the bacterium comprises genome modification(s) that reduce or eliminate activation of TLR2, whereby induction of type I IFN is not inhibited by TLR2.

2. The immunostimulatory bacterium of claim 1, wherein:
the genome of the immunostimulatory bacterium is modified by deletion or disruption of all or of a sufficient portion of a gene or genes, whereby the bacterium lacks flagella; and
the unmodified bacterium comprises flagella.

3. The immunostimulatory bacterium of claim 1, wherein:
the therapeutic product is a variant protein that is part of the cytosolic DNA/RNA sensor pathway;
the variant protein comprises amino acid modifications, whereby expression of the variant protein in a eukaryotic host cell results in constitutive expression of type I IFN; and
amino acid modifications comprise one or more of an amino acid insertion, deletion, and replacement.

4. The immunostimulatory bacterium of claim 3, wherein:
the product is a modified STING, IRF3, IRF5, IRF7, IRF8, MDA5, or RIG-I protein that comprises amino acid modifications, whereby expression of type I interferon is constitutive; and
the modifications comprise one or more of an amino acid replacement, insertion, and deletion.

5. The immunostimulatory bacterium of claim 3, wherein the amino acid modifications are selected as follows:
a) in STING, with reference to SEQ ID NOs: 305-309, one or more selected from among: S102P, V147L, V147M, N154S, V155M, G166E, C206Y, G207E, S102P/F279L, F279L, R281Q, R284G, R284S, R284M, R284K, R284T, R197A, D205A, R310A, R293A, T294A, E296A, R197A/D205A, S272A/Q273A, R310A/E316A, E316A, E316N, E316Q, S272A, R293A/T294A/E296A, D231A, R232A, K236A, Q273A, S358A/E360A/S366A, D231A/R232A/K236A/R238A, S358A, E360A, S366A, R238A, R375A, N154S/R284G, and S324A/S326A;
b) in MDA5, with reference to SEQ ID NO:310, one or more of T331I, T331R, A489T, R822Q, G821S, A946T, R337G, D393V, G495R, R720Q, R779H, R779C, L372F, and A452T;
c) in RIG-I, with reference to SEQ ID NO:311, one or both of E373A and C268F; and
d) in IRF-3, with reference to SEQ ID NO:312, S396D.

6. The immunostimulatory bacterium of claim 1, wherein the immunostimulatory bacterium comprises a plasmid that encodes an interferon, or encodes a modified STING protein that constitutively induces type I interferon, and the plasmid encodes an antigen or protein from a pathogen or a tumor-associated antigen.

7. The immunostimulatory bacterium of claim 1, wherein the genome of the immunostimulatory bacterium is modified by deletion or disruption of all or of a sufficient portion of a gene or genes, whereby the bacterium produces lipopolysaccharide (LPS) with penta-acylated lipid A.

8. The immunostimulatory bacterium of claim 1, wherein the genome is modified so that the bacterium lacks curli fimbriae.

9. The immunostimulatory bacterium of claim 1, wherein the therapeutic product is encoded by nucleic acid that is operatively linked to a prokaryotic promoter.

10. The immunostimulatory bacterium of claim 9, wherein the nucleic acid encoding the therapeutic product is transcribed in the bacterium, but cannot be translated by the bacterium.

11. The immunostimulatory bacterium of claim 4, wherein the plasmid further comprises nucleic acid encoding an antigen from a pathogen or a tumor-associated antigen.

12. The immunostimulatory bacterium of claim 11, wherein the tumor-associated antigen is an oncofetal antigen, an oncoviral antigen, an overexpressed/accumulated antigen, a cancer-testis antigen, a linear restricted antigen, a mutated antigen, a post-translationally altered antigen, or an idiotypic antigen.

13. The immunostimulatory bacterium of claim 1 that comprises genome modifications whereby the bacterium lacks flagella, is msbB⁻/pagP⁻, and lacks curli fimbriae, wherein genome modifications include deletions, insertions, replacements, and transpositions.

14. The immunostimulatory bacterium of claim 13 that comprises modifications that render the bacterium asd⁻, whereby the bacterium does not replicate in vivo, and comprises nucleic acid encoding aspartate dehydrogenase (asd) on the plasmid under control of a prokaryotic promoter for growth of the bacteria in vitro.

15. An immunostimulatory bacterium, comprising genome modifications that reduce or eliminate activation of TLR2, whereby induction of type I IFN is not inhibited by TLR2, wherein:
the immunostimulatory bacterium comprises a plasmid that encodes a tumor-associated antigen, or encodes a tumor-associated antigen and a modified STING protein, or encodes a tumor-associated antigen and interferon alpha, or encodes a tumor-associated antigen and interferon beta, wherein the modified STING protein constitutively induces type I interferon; and
nucleic acid encoding the product is operatively linked to a prokaryotic promoter.

16. The immunostimulatory bacterium of claim 15, wherein the tumor-associated antigen is an oncofetal antigen, an oncoviral antigen, an overexpressed/accumulated antigen, a cancer-Testis antigen, a linear restricted antigen, a mutated antigen, a post-translationally altered antigen, or an idiotypic antigen.

17. The immunostimulatory bacterium claim 16, wherein the tumor-associated antigen (TAA) is selected from among the following antigens:
a) an oncofetal antigen selected from among carcinoembryonic antigen (CEA), immature laminin receptor, and tumor-associated glycoprotein 72 (TAG-72);
b) an oncoviral TAA selected from HPV E6 and HPV E7;
c) an overexpressed/accumulated TAA selected from among epidermal Growth Factor Receptor (EGFR), Wilms' tumor protein, calcium-activated chloride channel 2, cyclin-B1, 9D7, epithelial cell adhesion molecule (EpCAM), Ephrin type-A receptor 3 (EphA3), human epidermal growth factor receptor 2 (HER2/Neu), telomerase, mesothelin, stomach-cancer-associated protein tyrosine phosphatase 1 (SAP-1), and survivin;
d) a cancer testis TAA selected from among BAGE (B melanoma antigen) family, CAGE family, GAGE family, MAGE (melanoma antigen) family, SAGE (sarcoma antigen) family, PAGE family, XAGE family, CT9, CT10, New York esophageal squamous cell carcinoma 1 (NY-ESO-1), LAGE-1, preferentially expressed antigen in melanoma (PRAME), and synovial sarcoma/X breakpoint 2 (SSX-2);
e) a linear-restricted TAA selected from melanoma antigen recognized by T-cells 1 (Melan-A/MART-1), gp100/Pmel17, tyrosinase, tyrosinase related protein (TRP)-1, TRP-2, polypeptide, melanocortin 1 receptor (MC1R), and prostate-specific antigen (PSA);
f) a mutated TAA selected from among β-catenin, BRCA1, BRCA2, cyclin dependent kinase 4 (CDK4), chronic myelogenous leukemia tumor antigen 66 (CML66), fibronectin, melanoma antigen recognized by T-cells 2 (MART-2), p53, Ras, and TGF-β receptor type II (TGF-βRII);
g) a post-translationally altered TAA that is mucin 1, cell surface associated (MUC1); and
h) an idiotypic TAA that is immunoglobulin Ig or T-cell Receptor (TCR).

18. The immunostimulatory bacterium of claim 15 that comprises genome modifications whereby the bacterium is pagP⁻/msbB⁻ and lacks flagella, wherein the wild-type bacterium has flagella.

19. The immunostimulatory bacterium of claim 15 that is a Salmonella strain.

20. An immunostimulatory bacterium, comprising a plasmid containing nucleic acid encoding a therapeutic product, wherein:
the nucleic acid encoding the therapeutic product is operatively linked to a prokaryotic promoter; and
the bacterium comprises genome modifications that reduce or eliminates recognition of the bacterium by or activation of TLR2, and optionally TLR4 and/or TLR5, whereby induction of type I IFN is not inhibited compared to the bacterium without the genome modifications.

21. The immunostimulatory bacterium of claim 20, wherein the nucleic acid encodes RNA that cannot be translated by prokaryote ribosomes, but can be translated by eukaryotic ribosomes, whereby the bacterium, when cultured in vitro, comprises RNA transcribed from the nucleic acid encoding the therapeutic product.

22. The immunostimulatory bacterium of claim 21, wherein the RNA lacks a Shine-Dalgarno sequence and/or includes an Internal Ribosome Entry Site (IRES), and/or a translational read through 2A peptide.

23. The immunostimulatory bacterium of claim 20, wherein the nucleic acid encodes a modified STING protein that constitutively induces type I interferon, and encodes a tumor-associated antigen and/or an antigen from a pathogen.

24. An immunostimulatory bacterium, comprising a plasmid encoding a combination of heterologous products, wherein:
the genome of the immunostimulatory bacterium is modified by deletion or disruption of all or of a sufficient portion of a gene or genes, whereby the bacterium has attenuated recognition by TLR2, and optionally attenuated recognition of one or both of TLR4 and TLR5;
one plasmid encoded product is a protein that is part of a cytosolic DNA/RNA sensor pathway that leads to expression of type I interferon (IFN), wherein the product is modified whereby expression of type I interferon is constitutive; and
a second encoded product is an antigen, an epitope or epitopes from an antigen, a protein for immunization against a pathogen or tumor, an anti-viral therapeutic, or an anti-pathogenic bacteria therapeutic.

25. The immunostimulatory bacterium of claim 24, wherein the genome of the bacterium is modified whereby the bacterium does not have curli fimbriae, if the wild-type bacterium contains flagella, the bacterium lacks flagella, and the bacterium is penta-acylated.

26. The immunostimulatory bacterium claim 24, wherein:
the bacterium comprises genome modifications, whereby the phenotype of the resulting bacterium is selected from among modifications comprising:
a) asd⁻, csgD⁻, purI⁻, msbB⁻, flagellin⁻, and pagP⁻;
b) thyA⁻, csgD⁻, purI⁻, msbB⁻, flagellin⁻, and pagP⁻;
c) ansB⁻, asd⁻, csgD⁻, purI⁻, msbB⁻, flagellin⁻, and pagP⁻;
d) ansB⁻, thyA⁻, csgD⁻, purI⁻, msbB⁻, flagellin⁻, and pagP⁻; and
e) asd⁻, ansB⁻, thyA⁻, csgD⁻, purI⁻, msbB⁻, flagellin⁻, and pagP⁻,
wherein, if the bacterium is asd⁻, it optionally encodes aspartate dehydrogenase (asd) on the plasmid under control of a prokaryotic promoter for expression of asd in vitro.

27. The immunostimulatory bacterium of claim 24, wherein a therapeutic product encoded on the plasmid is an anti-viral therapeutic or an anti-pathogenic bacteria therapeutic.

28. The immunostimulatory bacterium of claim 24, wherein a therapeutic product encoded on the plasmid is an anti-viral therapeutic that is a viral antigen whose expression results in an immune-protective response against a virus, or is an antibody that binds to or interacts with a viral antigen, whereby a virus is inhibited or blocked, or anti-viral immunity results.

29. The immunostimulatory bacterium of claim 24, wherein:
the encoded protein that is part of a cytosolic DNA/RNA sensor pathway is a modified STING protein that constitutively induces type I interferon; and
another encoded product or products is/are a tumor-associated antigen and/or an antigen from a pathogen.

30. The immunostimulatory bacterium of claim 29, wherein the encoded products are encoded as a polycistronic message under control of a single prokaryotic promoter for expression in the bacterium.

31. The immunostimulatory bacterium of claim 27, wherein the therapeutic is an anti-bacterial therapeutic that is a bacterial antigen whose expression results in an immune-protective response against the bacterial pathogen, or the anti-bacterial therapeutic is an antibody that binds to or interacts with a bacterial antigen, whereby the pathogenic bacterium is inhibited or blocked, or anti-pathogenic bacterium immunity results.

32. The immunostimulatory bacterium of claim 27, wherein the immunostimulatory bacterium encodes a therapeutic for treating an infectious agent that causes persistent infection, or for treating an infectious agent that causes chronic infection, or for treating an infectious agent that causes latent infection, or for treating an infectious agent that causes slow infection.

33. The immunostimulatory bacterium of claim 32, wherein the infectious agent is a virus selected from among T-Cell leukemia viruses, Epstein-Barr virus, cytomegalovirus, herpesviruses, varicella zoster virus, measles virus, papovaviruses, hepatitis virus type A, B, C, D and E, adenoviruses, parvoviruses, human immunodeficiency virus (HIV), coronaviruses, smallpox virus, poliovirus, influenza virus, rotavirus, yellow fever virus, mumps virus, rubella virus, and papillomaviruses; or is a bacterium; or is a prion; or is a protozoan.

34. The immunostimulatory bacterium of claim 24 that is a strain designated as YS1646Δasd/ΔFLG/ΔpagP/ΔansB/ΔcsgD/F-ΔpurI, or YS1646Δasd/ΔFLG/ΔpagP/ΔansB/ΔcsgD/F-ΔpurI/ΔthyA.

35. An immunostimulatory bacterium, comprising nucleic acid operatively linked to a prokaryotic promoter, wherein:
the nucleic acid comprises DNA that lacks sequences necessary for translation by a prokaryote or comprises sequences that prevent translation by the a prokaryote, whereby the RNA is produced in the bacterium, but cannot be translated by the bacterium;
the bacterium has genomic modifications whereby infection is substantially or is restricted to phagocytic cells; and
the RNA encodes a therapeutic product or is a therapeutic product.

36. The immunostimulatory bacterium of claim 35, wherein the genome of the immunostimulatory bacterium is modified by deletion or disruption of all or of a sufficient portion of the gene ansB, encoding L-asparaginase II, and by deletion or disruption of all or of a sufficient portion of the gene csgD, whereby the bacterium is ansB⁻ and does not express active L-asparaginase II, and is csgD⁻ and does not activate the synthesis of curli fimbriae.

37. The immunostimulatory bacterium of claim 36, wherein the genome of the bacterium is further modified by deletion or disruption of all or of a sufficient portion of genes, whereby the bacterium is csgD⁻/msbB⁻/pagP⁻.

38. An immunostimulatory bacterium, comprising a plasmid encoding a therapeutic product, wherein:
the product is a bi-specific T-cell engager antibody that binds DLL3 and CD3;
the immunostimulatory bacterium lacks flagella and comprises LPS that is penta-acylated; and
the wild-type bacterium comprises flagella.

39. The immunostimulatory bacterium of claim 38, wherein the bi-specific T-cell engager antibody comprises a heavy chain and light chain of an anti-DLL3 antibody and of an anti-CD3 antibody.

40. The immunostimulatory bacterium of claim 38, wherein the bi-specific T-cell engager antibody comprises combinations of a)-f), whereby the resulting construct can bind to each of DLL3 and CD3:
a) a light chain that comprises amino acid residues 154-260 of SEQ ID NO: 487, or a humanized variant thereof, or a variant having at least 95% sequence identity thereto; and
b) a heavy chain that comprises the sequence of amino acid residues set forth as amino acid residues 22-138 of SEQ ID NO: 487, or a humanized variant thereof, or a variant having at least 95% sequence identity thereto; and
c) a light chain that comprises a sequence of amino acid residues set forth as amino acid residues 155-261 of SEQ ID NO: 489, or a humanized variant thereof, or a variant having at least 95% sequence identity thereto; and
d) a heavy chain that comprises a sequence of amino acid residues set forth as amino acid residues 22-139 of SEQ ID NO: 489, or a humanized variant thereof, or a variant having at least 95% sequence identity thereto; and
e) a heavy and light chain, wherein:
the light chain comprises a sequence of amino acid residues set forth as amino acid residues 155-261 of SEQ ID NO: 485, or a humanized variant thereof, or a variant having at least 95% sequence identity thereto; and
the heavy chain comprises a sequence of amino acid residues set forth as amino acid residues 22-139 of SEQ ID NO: 485, or a humanized variant thereof, or a variant having at least 95% sequence identity thereto; and
f) a heavy and light chain of an anti-CD3 antibody, wherein:
the light chain of the anti-CD3 antibody comprises a sequence of amino acid residues set forth as amino acid residues 398-504 of SEQ ID NO: 485, or a humanized variant thereof, or a variant having at least 95% sequence identity thereto; and
the heavy chain of the anti-CD3 antibody comprises a sequence of amino acid residues set forth as amino acid residues 267-382 of SEQ ID NO: 485, or a humanized variant thereof, or a variant having at least 95% sequence identity thereto.

41. An immunostimulatory bacterium, comprising a plasmid that encodes two or more therapeutic products under control of a single promoter, wherein:
the therapeutic products are selected from among:
a) an immunostimulatory protein that confers or contributes to an anti-tumor immune response in the tumor microenvironment;
b) one or more of a protein that is part of a cytosolic DNA/RNA sensor pathway, wherein the protein is a variant that results in constitutive expression of a type I IFN; and
c) an anti-cancer antibody or antigen-binding portion thereof, and
the encoding nucleic acids are separated by an IRES sequence or 2A peptides, and each nucleic acid encoding each product is optionally operatively linked to nucleic acid encoding a signal sequence, whereby, upon translation of the encoded mRNA, each product is separately expressed and secreted from a cell comprising the bacterium and/or plasmid.

42. The immunostimulatory bacterium of claim 41, wherein the immunostimulatory protein is a co-stimulatory molecule that lacks a cytoplasmic domain or a sufficient portion thereof, for expression on an antigen-presenting cell (APC), whereby the truncated co-stimulatory molecule is capable of constitutive immunostimulatory signaling to a T-cell through co-stimulatory receptor engagement and is unable to counter-regulatory signal to the antigen presenting cell (APC).

43. The immunostimulatory bacterium of claim 41, wherein the immunostimulatory bacterium comprises a plasmid that encodes the at least two therapeutic products, wherein the products are selected from among a cytokine, a protein that constitutively induces a type I IFN, a co-stimulatory molecule, and an anti-cancer antibody or antigen-binding portion thereof, and also encodes an antigen or an antigenic protein.

44. An immunostimulatory bacterium that is a strain designated as YS1646Δasd/ΔFLG/ΔpagP/ΔansB/ΔcsgD/F-ΔpurI, or YS1646Δasd/ΔFLG/ΔpagP/ΔansB/ΔcsgD/F-ΔpurI/ΔthyA.

45. A genome modified bacterium, comprising genome modifications, whereby the response by toll-like receptors (TLRs) 2, 4, and 5 is reduced compared to the bacterium without the genome modifications, wherein:
the bacterium comprises further genomic modifications whereby it is auxotrophic for a required nutrient or factor so that it is unable to replicate in a eukaryotic host, but can replicate in vitro when supplied with the nutrient or factor;
the bacterium comprises a plasmid containing nucleic acid encoding a product, or the bacterium comprises RNA encoding the product;
the product encoded by the nucleic acid or RNA is an antigenic sequence or sequence from a pathogen that is a pathogenic virus, bacterium, prion, or parasite, or is a tumor-associated antigen, whereby, upon expression of the encoded antigenic sequence in the host, the host develops an immune-protective response or immunizing response against the pathogenic virus, bacterium, prion, parasite, or tumor-associated antigen, or the product is a therapeutic product against a pathogen or tumor;
expression of the antigenic sequence(s) is/are under control of a prokaryotic promoter so that RNA encoding the product is produced in the bacterium;
nucleic acid encoding the antigen comprises regulatory sequences that inhibit or prevent translation of the encoded RNA by bacterial ribosomes, but that does not inhibit or prevent translation of the encoded RNA by eukaryotic host ribosomes, whereby translation is de-coupled from transcription in the bacterium; and
the resulting bacterium is selective for infecting phagocytic cells when administered to a eukaryotic subject, and delivers the nucleic acid into the phagocytic cells, wherein the RNA is translated.

46. The bacterium of claim 45 that comprises nucleic acid encoding a TLR8 agonist.

47. The bacterium of claim 45 that is msbB⁻/pagP⁻, lacks flagella, and is asd⁻ or thyA⁻ or both asd⁻ and thyA⁻.

48. The bacterium of claim 45 that is a species or strain of Escherichia, Listeria, Mycobacteria, or Salmonella.

49. A vaccine, comprising nucleic acid that encodes an antigen or protein or epitope from a pathogen or tumor, wherein:
the vaccine elicits an immune response against the pathogen or tumor;
the pathogen is a respiratory pathogen that infects the respiratory system including the lungs and/or naso-pharynx;
the tumor is a lung tumor;
the vaccine is formulated for inhalation through the nose or lungs;
the vaccine delivers the nucleic acid to phagocytic macrophages to convert the immunosuppressive phagocytic macrophages to immunostimulatory, phagocytic macrophages that are capable of in situ antigen cross-presentation to CD8+ T-cells, and of migration to lymph nodes to prime CD4+ and CD8+ T-cells; and
the vaccine does not activate a TLR2, TLR4 and/or TRL5 response sufficient to decease or inhibit type I IFN.

50. The vaccine of claim 49, wherein the pathogen is a virus.

51. The vaccine of claim 50, wherein the virus is a corona virus or influenza virus.

52. A pharmaceutical composition, comprising the immunostimulatory bacterium of claim 1 in a pharmaceutically acceptable vehicle.

53. A method of treatment or immunization against infection with a pathogen or against a tumor, comprising administering the immunostimulatory bacterium of claim 35, wherein the immunostimulatory bacterium comprises or encodes an antigen, protein, or epitope thereof from the pathogen or tumor.

54. The method of claim 53, wherein the immunostimulatory bacterium encodes the antigen, protein or epitope thereof under control of a promoter recognized by the bacterium; and the immunostimulatory bacterium comprises a genome modification(s), whereby it does not replicate in vivo.

55. A method of treatment of cancer or a viral infection, comprising administering the immunostimulatory bacterium of claim 1 to a subject with cancer or a viral infection.

The application's sequence listing, which the Patent Office published only in electronic form, follows.

SEQUENCE LISTING (496 sequences)

SEQ ID NO: 1 - DNA, 19 bp, Homo sapiens
  Human PD-L1 shRNA target 1
gtagagtatggtagcaata

SEQ ID NO: 2 - DNA, 19 bp, Homo sapiens
  Human PD-L1 shRNA target 2
gccgactacaagcgaatta

SEQ ID NO: 3 - DNA, 19 bp, Homo sapiens
  Human PD-L1 shRNA target 3
gacaagcagtgaccatcaa

SEQ ID NO: 4 - DNA, 19 bp, Homo sapiens
  Human PD-L1 shRNA target 4
gaatcaacacaacaactaa

SEQ ID NO: 5 - DNA, 19 bp, Homo sapiens
  Human PD-L1 shRNA target 5
gcacatcctccaaatgaaa

SEQ ID NO: 6 - DNA, 19 bp, Homo sapiens
  Human PD-L1 shRNA target 6
gtagcactgacattcatct

SEQ ID NO: 7 - DNA, 19 bp, Homo sapiens
  Human CTNNB1 shRNA target 1
gacagactgccttcaaatt

SEQ ID NO: 8 - DNA, 19 bp, Homo sapiens
  Human CTNNB1 shRNA target 2
gcagctggaattctttcta

SEQ ID NO: 9 - DNA, 19 bp, Homo sapiens
  Human CTNNB1 shRNA target 3
gactaccagttgtggttaa

SEQ ID NO: 10 - DNA, 19 bp, Homo sapiens
  Human CTNNB1 shRNA target 4
ggacacagcagcaatttgt

SEQ ID NO: 11 - DNA, 19 bp, Homo sapiens
  Human CTNNB1 shRNA target 5
ggatgttcacaaccgaatt

SEQ ID NO: 12 - DNA, 19 bp, Homo sapiens
  Human CTNNB1 shRNA target 6
gccacaagattacaagaaa

SEQ ID NO: 13 - DNA, 19 bp, Homo sapiens
  Human SIRP-alpha shRNA target 1
gccaggtgaggaagttcta

SEQ ID NO: 14 - DNA, 19 bp, Homo sapiens
  Human SIRP-alpha shRNA target 2
gagctggctcctggtgaat

SEQ ID NO: 15 - DNA, 19 bp, Homo sapiens
  Human SIRP-alpha shRNA target 3
gctgagaacactggatcta

SEQ ID NO: 16 - DNA, 19 bp, Homo sapiens
  Human SIRP-alpha shRNA target 4
gaagaatgccagagaaata

SEQ ID NO: 17 - DNA, 19 bp, Homo sapiens
  Human SIRP-alpha shRNA target 5
ggacacaaatgatatcaca

SEQ ID NO: 18 - DNA, 19 bp, Homo sapiens
  Human SIRP-alpha shRNA target 6
ggagtatgccagcattcag

SEQ ID NO: 19 - DNA, 19 bp, Homo sapiens
  Human Trex1 shRNA target 1
gcagcgcatgggcgtcaat

SEQ ID NO: 20 - DNA, 19 bp, Homo sapiens
  Human Trex1 shRNA target 2
ggcccaaggaagagctata

SEQ ID NO: 21 - DNA, 19 bp, Homo sapiens
  Human Trex1 shRNA target 3
gcaccatcaggcccatgta

SEQ ID NO: 22 - DNA, 19 bp, Homo sapiens
  Human Trex1 shRNA target 4
gccacaaccaggaacacta

SEQ ID NO: 23 - DNA, 19 bp, Homo sapiens
  Human Trex1 shRNA target 5
gcaggggtaccaaggatct

SEQ ID NO: 24 - DNA, 19 bp, Homo sapiens
  Human Trex1 shRNA target 6
gccacactgtatggactat

SEQ ID NO: 25 - DNA, 19 bp, Homo sapiens
  Human VISTA shRNA target 1
gatgtgaccttctacaaga

SEQ ID NO: 26 - DNA, 19 bp, Homo sapiens
  Human VISTA shRNA target 2
gaccaccatggcaacttct

SEQ ID NO: 27 - DNA, 19 bp, Homo sapiens
  Human VISTA shRNA target 3
ggtgcagacaggcaaagat

SEQ ID NO: 28 - DNA, 19 bp, Homo sapiens
  Human VISTA shRNA target 4
gtgcctgcatcgtaggaat

SEQ ID NO: 29 - DNA, 19 bp, Homo sapiens
  Human VISTA shRNA target 5
gcaacattcaagggattga

SEQ ID NO: 30 - DNA, 19 bp, Homo sapiens
  Human VISTA shRNA target 6
gtccctgactctccaaact

SEQ ID NO: 31 - DNA, 870 bp, Homo sapiens
  programmed death-ligand 1 (PD-L1), isoform 1
atgaggatatttgctgtctttatattcatgacctactggcatttgctgaacgcatttactgtcacggttcccaaggacctatatgtggtagagtatggtagcaatatgacaattgaatgcaaattcccagtagaaaaacaattagacctggctgcactaattgtctattgggaaatggaggataagaacattattcaatttgtgcatggagaggaagacctgaaggttcagcatagtagctacagacagagggcccggctgttgaaggaccagctctccctgggaaatgctgcacttcagatcacagatgtgaaattgcaggatgcaggggtgtaccgctgcatgatcagctatggtggtgccgactacaagcgaattactgtgaaagtcaatgccccatacaacaaaatcaaccaaagaattttggttgtggatccagtcacctctgaacatgaactgacatgtcaggctgagggctaccccaaggccgaagtcatctggacaagcagtgaccatcaagtcctgagtggtaagaccaccaccaccaattccaagagagaggagaagcttttcaatgtgaccagcacactgagaatcaacacaacaactaatgagattttctactgcacttttaggagattagatcctgaggaaaaccatacagctgaattggtcatcccagaactacctctggcacatcctccaaatgaaaggactcacttggtaattctgggagccatcttattatgccttggtgtagcactgacattcatcttccgtttaagaaaagggagaatgatggatgtgaaaaaatgtggcatccaagatacaaactcaaagaagcaaagtgatacacatttggaggagacg

SEQ ID NO: 32 - DNA, 2343 bp, Homo sapiens
  CTNNB1 (Beta-catenin), isoform 1
atggctactcaagctgatttgatggagttggacatggccatggaaccagacagaaaagcggctgttagtcactggcagcaacagtcttacctggactctggaatccattctggtgccactaccacagctccttctctgagtggtaaaggcaatcctgaggaagaggatgtggatacctcccaagtcctgtatgagtgggaacagggattttctcagtccttcactcaagaacaagtagctgatattgatggacagtatgcaatgactcgagctcagagggtacgagctgctatgttccctgagacattagatgagggcatgcagatcccatctacacagtttgatgctgctcatcccactaatgtccagcgtttggctgaaccatcacagatgctgaaacatgcagttgtaaacttgattaactatcaagatgatgcagaacttgccacacgtgcaatccctgaactgacaaaactgctaaatgacgaggaccaggtggtggttaataaggctgcagttatggtccatcagctttctaaaaaggaagcttccagacacgctatcatgcgttctcctcagatggtgtctgctattgtacgtaccatgcagaatacaaatgatgtagaaacagctcgttgtaccgctgggaccttgcataacctttcccatcatcgtgagggcttactggccatctttaagtctggaggcattcctgccctggtgaaaatgcttggttcaccagtggattctgtgttgttttatgccattacaactctccacaaccttttattacatcaagaaggagctaaaatggcagtgcgtttagctggtgggctgcagaaaatggttgccttgctcaacaaaacaaatgttaaattcttggctattacgacagactgccttcaaattttagcttatggcaaccaagaaagcaagctcatcatactggctagtggtggaccccaagctttagtaaatataatgaggacctatacttacgaaaaactactgtggaccacaagcagagtgctgaaggtgctatctgtctgctctagtaataagccggctattgtagaagctggtggaatgcaagctttaggacttcacctgacagatccaagtcaacgtcttgttcagaactgtctttggactctcaggaatctttcagatgctgcaactaaacaggaagggatggaaggtctccttgggactcttgttcagcttctgggttcagatgatataaatgtggtcacctgtgcagctggaattctttctaacctcacttgcaataattataagaacaagatgatggtctgccaagtgggtggtatagaggctcttgtgcgtactgtccttcgggctggtgacagggaagacatcactgagcctgccatctgtgctcttcgtcatctgaccagccgacaccaagaagcagagatggcccagaatgcagttcgccttcactatggactaccagttgtggttaagctcttacacccaccatcccactggcctctgataaaggctactgttggattgattcgaaatcttgccctttgtcccgcaaatcatgcacctttgcgtgagcagggtgccattccacgactagttcagttgcttgttcgtgcacatcaggatacccagcgccgtacgtccatgggtgggacacagcagcaatttgtggagggggtccgcatggaagaaatagttgaaggttgtaccggagcccttcacatcctagctcgggatgttcacaaccgaattgttatcagaggactaaataccattccattgtttgtgcagctgctttattctcccattgaaaacatccaaagagtagctgcaggggtcctctgtgaacttgctcaggacaaggaagctgcagaagctattgaagctgagggagccacagctcctctgacagagttacttcactctaggaatgaaggtgtggcgacatatgcagctgctgttttgttccgaatgtctgaggacaagccacaagattacaagaaacggctttcagttgagctgaccagctctctcttcagaacagagccaatggcttggaatgagactgctgatcttggacttgatattggtgcccagggagaaccccttggatatcgccaggatgatcctagctatcgttcttttcactctggtggatatggccaggatgccttgggtatggaccccatgatggaacatgagatgggtggccaccaccctggtgctgactatccagttgatgggctgccagatctggggcatgcccaggacctcatggatgggctgcctccaggtgacagcaatcagctggcctggtttgatactgacctg

SEQ ID NO: 33 - DNA, 1512 bp, Homo sapiens
  signal regulatory protein alpha (SIRP-alpha) isoform 1
atggagcccgccggcccggcccccggccgcctcgggccgctgctctgcctgctgctcgccgcgtcctgcgcctggtcaggagtggcgggtgaggaggagctgcaggtgattcagcctgacaagtccgtgttggttgcagctggagagacagccactctgcgctgcactgcgacctctctgatccctgtggggcccatccagtggttcagaggagctggaccaggccgggaattaatctacaatcaaaaagaaggccacttcccccgggtaacaactgtttcagacctcacaaagagaaacaacatggacttttccatccgcatcggtaacatcaccccagcagatgccggcacctactactgtgtgaagttccggaaagggagccccgatgacgtggagtttaagtctggagcaggcactgagctgtctgtgcgcgccaaaccctctgcccccgtggtatcgggccctgcggcgagggccacacctcagcacacagtgagcttcacctgcgagtcccacggcttctcacccagagacatcaccctgaaatggttcaaaaatgggaatgagctctcagacttccagaccaacgtggaccccgtaggagagagcgtgtcctacagcatccacagcacagccaaggtggtgctgacccgcgaggacgttcactctcaagtcatctgcgaggtggcccacgtcaccttgcagggggaccctcttcgtgggactgccaacttgtctgagaccatccgagttccacccaccttggaggttactcaacagcccgtgagggcagagaaccaggtgaatgtcacctgccaggtgaggaagttctacccccagagactacagctgacctggttggagaatggaaacgtgtcccggacagaaacggcctcaaccgttacagagaacaaggatggtacctacaactggatgagctggctcctggtgaatgtatctgcccacagggatgatgtgaagctcacctgccaggtggagcatgacgggcagccagcggtcagcaaaagccatgacctgaaggtctcagcccacccgaaggagcagggctcaaataccgccgctgagaacactggatctaatgaacggaacatctatattgtggtgggtgtggtgtgcaccttgctggtggccctactgatggcggccctctacctcgtccgaatcagacagaagaaagcccagggctccacttcttctacaaggttgcatgagcccgagaagaatgccagagaaataacacaggacacaaatgatatcacatatgcagacctgaacctgcccaaggggaagaagcctgctccccaggctgcggagcccaacaaccacacggagtatgccagcattcagaccagcccgcagcccgcgtcggaggacaccctcacctatgctgacctggacatggtccacctcaaccggacccccaagcagccggcccccaagcctgagccgtccttctcagagtacgccagcgtccaggtcccgaggaag

SEQ ID NO: 34 - DNA, 1108 bp, Homo sapiens
  TREX1 isoform 1
aatgggccctggagctcgcagacagggcaggattgtgcagggaaggcctgagatgtgcttctgcccaccccctaccccactccctccccttcggatcttaacactgggcactcacacacccaccccatgctcctctccaggctcagcagcaggtacgtacccaaccatgggctcgcaggccctgcccccggggcccatgcagaccctcatctttttcgacatggaggccactggcttgcccttctcccagcccaaggtcacggagctgtgcctgctggctgtccacagatgtgccctggagagcccccccacctctcaggggccacctcccacagttcctccaccaccgcgtgtggtagacaagctctccctgtgtgtggctccggggaaggcctgcagccctgcagccagcgagatcacaggtctgagcacagctgtgctggcagcgcatgggcgtcaatgttttgatgacaacctggccaacctgctcctagccttcctgcggcgccagccacagccctggtgcctggtggcacacaatggtgaccgctacgacttccccctgctccaagcagagctggctatgctgggcctcaccagtgctctggatggtgccttctgtgtggatagcatcactgcgctgaaggccctggagcgagcaagcagcccctcagaacacggcccaaggaagagctatagcctaggcagcatctacactcgcctgtatgggcagtcccctccagactcgcacacggctgagggtgatgtcctggccctgctcagcatctgtcagtggagaccacaggccctgctgcggtgggtggatgctcacgccaggcctttcggcaccatcaggcccatgtatggggtcacagcctctgctaggaccaagccaagaccatctgctgtcacaaccactgcacacctggccacaaccaggaacactagtcccagccttggagagagcaggggtaccaaggatcttcctccagtgaaggaccctggagccctatccagggaggggctgctggccccactgggtctgctggccatcctgaccttggcagtagccacactgtatggactatccctggccacacctggggag

SEQ ID NO: 35 - DNA, 933 bp, Homo sapiens
  V-domain Ig suppressor of T cell activation (VISTA)
atgggcgtccccacggccctggaggccggcagctggcgctggggatccctgctcttcgctctcttcctggctgcgtccctaggtccggtggcagccttcaaggtcgccacgccgtattccctgtatgtctgtcccgaggggcagaacgtcaccctcacctgcaggctcttgggccctgtggacaaagggcacgatgtgaccttctacaagacgtggtaccgcagctcgaggggcgaggtgcagacctgctcagagcgccggcccatccgcaacctcacgttccaggaccttcacctgcaccatggaggccaccaggctgccaacaccagccacgacctggctcagcgccacgggctggagtcggcctccgaccaccatggcaacttctccatcaccatgcgcaacctgaccctgctggatagcggcctctactgctgcctggtggtggagatcaggcaccaccactcggagcacagggtccatggtgccatggagctgcaggtgcagacaggcaaagatgcaccatccaactgtgtggtgtacccatcctcctcccaggatagtgaaaacatcacggctgcagccctggctacgggtgcctgcatcgtaggaatcctctgcctccccctcatcctgctcctggtctacaagcaaaggcaggcagcctccaaccgccgtgcccaggagctggtgcggatggacagcaacattcaagggattgaaaaccccggctttgaagcctcaccacctgcccaggggatacccgaggccaaagtcaggcaccccctgtcctatgtggcccagcggcagccttctgagtctgggcggcatctgctttcggagcccagcacccccctgtctcctccaggccccggagacgtcttcttcccatccctggaccctgtccctgactctccaaactttgaggtcatc

SEQ ID NO: 36 - DNA, 45 bp, Artificial Sequence
  shRNA-encoding sequence for huPD-L1
gtagagtatggtagcaatatctagagtattgctaccatactctac

SEQ ID NO: 37 - DNA, 45 bp, Artificial Sequence
  shRNA-encoding sequence for huCTNNB1
gacagactgccttcaaatttctagagaatttgaaggcagtctgtc

SEQ ID NO: 38 - DNA, 45 bp, Artificial Sequence
  shRNA-encoding sequence for huSIRPalpha
gccaggtgaggaagttctatctagagtagaacttcctcacctggc

SEQ ID NO: 39 - DNA, 45 bp, Artificial Sequence
  shRNA-encoding sequence for huTREX1
gcagcgcatgggcgtcaattctagagattgacgcccatgcgctgc

SEQ ID NO: 40 - DNA, 45 bp, Artificial Sequence
  shRNA-encoding sequence for huVISTA
gaccaccatggcaacttcttctagagagaagttgccatggtggtc

SEQ ID NO: 41 - DNA, 3220 bp, Artificial Sequence
  pEQU6 vector
ctttcctgcgttatcccctgattctgtggataaccgtattaccgcctttgagtgagctgataccgctcgccgcagccgaacgaccgagcgcagcgagtcagtgagcgaggaagcggaagagcgcccaatacgcaaaccgcctctccccgcgcgttggccgattcattaatgcagctggcacgacaggtttcccgactggaaagcgggcagtgagcgcaacgcaattaatacgcgtaccgctagccaggaagagtttgtagaaacgcaaaaaggccatccgtcaggatggccttctgcttagtttgatgcctggcagtttatggcgggcgtcctgcccgccaccctccgggccgttgcttcacaacgttcaaatccgctcccggcggatttgtcctactcaggagagcgttcaccgacaaacaacagataaaacgaaaggcccagtcttccgactgagcctttcgttttatttgatgcctggcagttccctactctcgcgttaacgctagcatggatgttttcccagtcacgacgttgtaaaacgacggccagtcttaagctcgggccccaaataatgattttattttgactgatagtgacctgttcgttgcaacaaattgatgagcaatgcttttttataatgccaactttgtacaaaaaagcaggctttaaaggaaccaattcagtcgactggatccaaggtcgggcaggaagagggcctatttcccatgattccttcatatttgcatatacgatacaaggctgttagagagataattagaattaatttgactgtaaacacaaagatattagtacaaaatacgtgacgtagaaagtaataatttcttgggtagtttgcagttttaaaattatgttttaaaatggactatcatatgcttaccgtaacttgaaagtatttcgatttcttggctttatatatcttgtggaaaggacgaaactagttttttctcgagtagctagagaattcatggtaatagcgatgactaatacgtagatgtactgccaagtaggaaagtcccataaggtcatgtactgggcataatgccaggcgggccatttaccgtcattgacgtcaatagggggcgtacttggcatatgatacacttgatgtactgccaagtgggcagtttaccgtaaatagtccacccattgacgtcaatggaaagtccctattggcgttactatgggaacatacgtcattattgacgtcaatgggcgggggtcgttgggcggtcagccaggcgggccatttaccgtaagttatgtaacgcggaactccatatatgggctatgaactaatgaccccgtaattgattactattaataactagacccagctttcttgtacaaagttggcattataagaaagcattgcttatcaatttgttgcaacgaacaggtcactatcagtcaaaataaaatcattatttgccatccagctgatatcccctatagtgagtcgtattacatggtcatagctgtttcctggcagctctggcccgtgtctcaaaatctctgatgttacattgcacaagataaaaatatatcatcatgaacaataaaactgtctgcttacataaacagtaatacaaggggtgttatgagccatattcaacgggaaacgtcgaggccgcgattaaattccaacatggatgctgatttatatgggtataaatgggctcgcgataatgtcgggcaatcaggtgcgacaatctatcgcttgtatgggaagcccgatgcgccagagttgtttctgaaacatggcaaaggtagcgttgccaatgatgttacagatgagatggtcagactaaactggctgacggaatttatgcctcttccgaccatcaagcattttatccgtactcctgatgatgcatggttactcaccactgcgatccccggaaaaacagcattccaggtattagaagaatatcctgattcaggtgaaaatattgttgatgcgctggcagtgttcctgcgccggttgcattcgattcctgtttgtaattgtccttttaacagcgatcgcgtatttcgtctcgctcaggcgcaatcacgaatgaataacggtttggttgatgcgagtgattttgatgacgagcgtaatggctggcctgttgaacaagtctggaaagaaatgcataaacttttgccattctcaccggattcagtcgtcactcatggtgatttctcacttgataaccttatttttgacgaggggaaattaataggttgtattgatgttggacgagtcggaatcgcagaccgataccaggatcttgccatcctatggaactgcctcggtgagttttctccttcattacagaaacggctttttcaaaaatatggtattgataatcctgatatgaataaattgcagtttcatttgatgctcgatgagtttttctaatcagaattggttaattggttgtaacactggcagagcattacgctgacttgacgggacggcgcaagctcatgaccaaaatcccttaacgtgagttacgcgtcgttccactgagcgtcagaccccgtagaaaagatcaaaggatcttcttgagatcctttttttctgcgcgtaatctgctgcttgcaaacaaaaaaaccaccgctaccagcggtggtttgtttgccggatcaagagctaccaactctttttccgaaggtaactggcttcagcagagcgcagataccaaatactgtccttctagtgtagccgtagttaggccaccacttcaagaactctgtagcaccgcctacatacctcgctctgctaatcctgttaccagtggctgctgccagtggcgataagtcgtgtcttaccgggttggactcaagacgatagttaccggataaggcgcagcggtcgggctgaacggggggttcgtgcacacagcccagcttggagcgaacgacctacaccgaactgagatacctacagcgtgagcattgagaaagcgccacgcttcccgaagggagaaaggcggacaggtatccggtaagcggcagggtcggaacaggagagcgcacgagggagcttccagggggaaacgcctggtatctttatagtcctgtcgggtttcgccacctctgacttgagcgtcgatttttgtgatgctcgtcaggggggcggagcctatggaaaaacgccagcaacgcggcctttttacggttcctggccttttgctggccttttgct

SEQ ID NO: 42 - DNA, 3802 bp, Artificial Sequence
  pEQU6-H1 Vector
ctttcctgcgttatcccctgattctgtggataaccgtattaccgcctttgagtgagctgataccgctcgccgcagccgaacgaccgagcgcagcgagtcagtgagcgaggaagcggaagagcgcccaatacgcaaaccgcctctccccgcgcgttggccgattcattaatgcagctggcacgacaggtttcccgactggaaagcgggcagtgagcgcaacgcaattaatacgcgtaccgctagccaggaagagtttgtagaaacgcaaaaaggccatccgtcaggatggccttctgcttagtttgatgcctggcagtttatggcgggcgtcctgcccgccaccctccgggccgttgcttcacaacgttcaaatccgctcccggcggatttgtcctactcaggagagcgttcaccgacaaacaacagataaaacgaaaggcccagtcttccgactgagcctttcgttttatttgatgcctggcagttccctactctcgcgttaacgctagcatggatgttttcccagtcacgacgttgtaaaacgacggccagtcttaagctcgggccccaaataatgattttattttgactgatagtgacctgttcgttgcaacaaattgatgagcaatgcttttttataatgccaactttgtacaaaaaagcaggctttaaaggaaccaattcagtcgagaattggtaccatatttgcatgtcgctatgtgttctgggaaatcaccataaacgtgaaatgtctttggatttgggaatcttataagttctgtatgagaccactccctaggtttttgtcgacagatctggcgcgccatagtggccagcggccgcaggtaagccagcccaggcctcgccctccagctcaaggcgggacaggtgccctagagtagcctgcatccagggacaggccccagccgggtgctgacacgtccacctccatctcttcctcaggtctgcccgggtggcatccctgtgacccctccccagtgcctctcctggccctggaagttgccactccagtgcccaccagccttgtcctaataaaattaagttgcatcattttgtctgactaggtgtccttctataatattatggggtggaggggggtggtatggagcaaggggcccaagttaacttgtttattgcagcttataatggttacaaataaagcaatagcatcacaaatttcacaaataaagcatttttttcactgcattctagttgtggtttgtccaaactcatcaatgtatcttatcatgtctggatccaaggtcgggcaggaagagggcctatttcccatgattccttcatatttgcatatacgatacaaggctgttagagagataattagaattaatttgactgtaaacacaaagatattagtacaaaatacgtgacgtagaaagtaataatttcttgggtagtttgcagttttaaaattatgttttaaaatggactatcatatgcttaccgtaacttgaaagtatttcgatttcttggctttatatatcttgtggaaaggacgaaactagttttttctcgagtagctagagaattcatggtaatagcgatgactaatacgtagatgtactgccaagtaggaaagtcccataaggtcatgtactgggcataatgccaggcgggccatttaccgtcattgacgtcaatagggggcgtacttggcatatgatacacttgatgtactgccaagtgggcagtttaccgtaaatagtccacccattgacgtcaatggaaagtccctattggcgttactatgggaacatacgtcattattgacgtcaatgggcgggggtcgttgggcggtcagccaggcgggccatttaccgtaagttatgtaacgcggaactccatatatgggctatgaactaatgaccccgtaattgattactattaataactagacccagctttcttgtacaaagttggcattataagaaagcattgcttatcaatttgttgcaacgaacaggtcactatcagtcaaaataaaatcattatttgccatccagctgatatcccctatagtgagtcgtattacatggtcatagctgtttcctggcagctctggcccgtgtctcaaaatctctgatgttacattgcacaagataaaaatatatcatcatgaacaataaaactgtctgcttacataaacagtaatacaaggggtgttatgagccatattcaacgggaaacgtcgaggccgcgattaaattccaacatggatgctgatttatatgggtataaatgggctcgcgataatgtcgggcaatcaggtgcgacaatctatcgcttgtatgggaagcccgatgcgccagagttgtttctgaaacatggcaaaggtagcgttgccaatgatgttacagatgagatggtcagactaaactggctgacggaatttatgcctcttccgaccatcaagcattttatccgtactcctgatgatgcatggttactcaccactgcgatccccggaaaaacagcattccaggtattagaagaatatcctgattcaggtgaaaatattgttgatgcgctggcagtgttcctgcgccggttgcattcgattcctgtttgtaattgtccttttaacagcgatcgcgtatttcgtctcgctcaggcgcaatcacgaatgaataacggtttggttgatgcgagtgattttgatgacgagcgtaatggctggcctgttgaacaagtctggaaagaaatgcataaacttttgccattctcaccggattcagtcgtcactcatggtgatttctcacttgataaccttatttttgacgaggggaaattaataggttgtattgatgttggacgagtcggaatcgcagaccgataccaggatcttgccatcctatggaactgcctcggtgagttttctccttcattacagaaacggctttttcaaaaatatggtattgataatcctgatatgaataaattgcagtttcatttgatgctcgatgagtttttctaatcagaattggttaattggttgtaacactggcagagcattacgctgacttgacgggacggcgcaagctcatgaccaaaatcccttaacgtgagttacgcgtcgttccactgagcgtcagaccccgtagaaaagatcaaaggatcttcttgagatcctttttttctgcgcgtaatctgctgcttgcaaacaaaaaaaccaccgctaccagcggtggtttgtttgccggatcaagagctaccaactctttttccgaaggtaactggcttcagcagagcgcagataccaaatactgtccttctagtgtagccgtagttaggccaccacttcaagaactctgtagcaccgcctacatacctcgctctgctaatcctgttaccagtggctgctgccagtggcgataagtcgtgtcttaccgggttggactcaagacgatagttaccggataaggcgcagcggtcgggctgaacggggggttcgtgcacacagcccagcttggagcgaacgacctacaccgaactgagatacctacagcgtgagcattgagaaagcgccacgcttcccgaagggagaaaggcggacaggtatccggtaagcggcagggtcggaacaggagagcgcacgagggagcttccagggggaaacgcctggtatctttatagtcctgtcgggtttcgccacctctgacttgagcgtcgatttttgtgatgctcgtcaggggggcggagcctatggaaaaacgccagcaacgcggcctttttacggttcctggccttttgctggccttttgct

SEQ ID NO: 43 - DNA, 3263 bp, Artificial Sequence
  pEQU6-shPDL1-shRNA Vector
ctttcctgcgttatcccctgattctgtggataaccgtattaccgcctttgagtgagctgataccgctcgccgcagccgaacgaccgagcgcagcgagtcagtgagcgaggaagcggaagagcgcccaatacgcaaaccgcctctccccgcgcgttggccgattcattaatgcagctggcacgacaggtttcccgactggaaagcgggcagtgagcgcaacgcaattaatacgcgtaccgctagccaggaagagtttgtagaaacgcaaaaaggccatccgtcaggatggccttctgcttagtttgatgcctggcagtttatggcgggcgtcctgcccgccaccctccgggccgttgcttcacaacgttcaaatccgctcccggcggatttgtcctactcaggagagcgttcaccgacaaacaacagataaaacgaaaggcccagtcttccgactgagcctttcgttttatttgatgcctggcagttccctactctcgcgttaacgctagcatggatgttttcccagtcacgacgttgtaaaacgacggccagtcttaagctcgggccccaaataatgattttattttgactgatagtgacctgttcgttgcaacaaattgatgagcaatgcttttttataatgccaactttgtacaaaaaagcaggctttaaaggaaccaattcagtcgactggatccaaggtcgggcaggaagagggcctatttcccatgattccttcatatttgcatatacgatacaaggctgttagagagataattagaattaatttgactgtaaacacaaagatattagtacaaaatacgtgacgtagaaagtaataatttcttgggtagtttgcagttttaaaattatgttttaaaatggactatcatatgcttaccgtaacttgaaagtatttcgatttcttggctttatatatcttgtggaaaggacgaaactaggtagagtatggtagcaatatctagagtattgctaccatactctacttttttcgagtagctagagaattcatggtaatagcgatgactaatacgtagatgtactgccaagtaggaaagtcccataaggtcatgtactgggcataatgccaggcgggccatttaccgtcattgacgtcaatagggggcgtacttggcatatgatacacttgatgtactgccaagtgggcagtttaccgtaaatagtccacccattgacgtcaatggaaagtccctattggcgttactatgggaacatacgtcattattgacgtcaatgggcgggggtcgttgggcggtcagccaggcgggccatttaccgtaagttatgtaacgcggaactccatatatgggctatgaactaatgaccccgtaattgattactattaataactagacccagctttcttgtacaaagttggcattataagaaagcattgcttatcaatttgttgcaacgaacaggtcactatcagtcaaaataaaatcattatttgccatccagctgatatcccctatagtgagtcgtattacatggtcatagctgtttcctggcagctctggcccgtgtctcaaaatctctgatgttacattgcacaagataaaaatatatcatcatgaacaataaaactgtctgcttacataaacagtaatacaaggggtgttatgagccatattcaacgggaaacgtcgaggccgcgattaaattccaacatggatgctgatttatatgggtataaatgggctcgcgataatgtcgggcaatcaggtgcgacaatctatcgcttgtatgggaagcccgatgcgccagagttgtttctgaaacatggcaaaggtagcgttgccaatgatgttacagatgagatggtcagactaaactggctgacggaatttatgcctcttccgaccatcaagcattttatccgtactcctgatgatgcatggttactcaccactgcgatccccggaaaaacagcattccaggtattagaagaatatcctgattcaggtgaaaatattgttgatgcgctggcagtgttcctgcgccggttgcattcgattcctgtttgtaattgtccttttaacagcgatcgcgtatttcgtctcgctcaggcgcaatcacgaatgaataacggtttggttgatgcgagtgattttgatgacgagcgtaatggctggcctgttgaacaagtctggaaagaaatgcataaacttttgccattctcaccggattcagtcgtcactcatggtgatttctcacttgataaccttatttttgacgaggggaaattaataggttgtattgatgttggacgagtcggaatcgcagaccgataccaggatcttgccatcctatggaactgcctcggtgagttttctccttcattacagaaacggctttttcaaaaatatggtattgataatcctgatatgaataaattgcagtttcatttgatgctcgatgagtttttctaatcagaattggttaattggttgtaacactggcagagcattacgctgacttgacgggacggcgcaagctcatgaccaaaatcccttaacgtgagttacgcgtcgttccactgagcgtcagaccccgtagaaaagatcaaaggatcttcttgagatcctttttttctgcgcgtaatctgctgcttgcaaacaaaaaaaccaccgctaccagcggtggtttgtttgccggatcaagagctaccaactctttttccgaaggtaactggcttcagcagagcgcagataccaaatactgtccttctagtgtagccgtagttaggccaccacttcaagaactctgtagcaccgcctacatacctcgctctgctaatcctgttaccagtggctgctgccagtggcgataagtcgtgtcttaccgggttggactcaagacgatagttaccggataaggcgcagcggtcgggctgaacggggggttcgtgcacacagcccagcttggagcgaacgacctacaccgaactgagatacctacagcgtgagcattgagaaagcgccacgcttcccgaagggagaaaggcggacaggtatccggtaagcggcagggtcggaacaggagagcgcacgagggagcttccagggggaaacgcctggtatctttatagtcctgtcgggtttcgccacctctgacttgagcgtcgatttttgtgatgctcgtcaggggggcggagcctatggaaaaacgccagcaacgcggcctttttacggttcctggccttttgctggccttttgct

SEQ ID NO: 44 - DNA, 3888 bp, Artificial Sequence
  pEQU6-shPDL1-H1-shCTNNB1 Vector
ctttcctgcgttatcccctgattctgtggataaccgtattaccgcctttgagtgagctgataccgctcgccgcagccgaacgaccgagcgcagcgagtcagtgagcgaggaagcggaagagcgcccaatacgcaaaccgcctctccccgcgcgttggccgattcattaatgcagctggcacgacaggtttcccgactggaaagcgggcagtgagcgcaacgcaattaatacgcgtaccgctagccaggaagagtttgtagaaacgcaaaaaggccatccgtcaggatggccttctgcttagtttgatgcctggcagtttatggcgggcgtcctgcccgccaccctccgggccgttgcttcacaacgttcaaatccgctcccggcggatttgtcctactcaggagagcgttcaccgacaaacaacagataaaacgaaaggcccagtcttccgactgagcctttcgttttatttgatgcctggcagttccctactctcgcgttaacgctagcatggatgttttcccagtcacgacgttgtaaaacgacggccagtcttaagctcgggccccaaataatgattttattttgactgatagtgacctgttcgttgcaacaaattgatgagcaatgcttttttataatgccaactttgtacaaaaaagcaggctttaaaggaaccaattcagtcgagaattggtaccatatttgcatgtcgctatgtgttctgggaaatcaccataaacgtgaaatgtctttggatttgggaatcttataagttctgtatgagaccactccctaggacagactgccttcaaatttctagagaatttgaaggcagtctgtcttttttcgacagatctggcgcgccatagtggccagcggccgcaggtaagccagcccaggcctcgccctccagctcaaggcgggacaggtgccctagagtagcctgcatccagggacaggccccagccgggtgctgacacgtccacctccatctcttcctcaggtctgcccgggtggcatccctgtgacccctccccagtgcctctcctggccctggaagttgccactccagtgcccaccagccttgtcctaataaaattaagttgcatcattttgtctgactaggtgtccttctataatattatggggtggaggggggtggtatggagcaaggggcccaagttaacttgtttattgcagcttataatggttacaaataaagcaatagcatcacaaatttcacaaataaagcatttttttcactgcattctagttgtggtttgtccaaactcatcaatgtatcttatcatgtctggatccaaggtcgggcaggaagagggcctatttcccatgattccttcatatttgcatatacgatacaaggctgttagagagataattagaattaatttgactgtaaacacaaagatattagtacaaaatacgtgacgtagaaagtaataatttcttgggtagtttgcagttttaaaattatgttttaaaatggactatcatatgcttaccgtaacttgaaagtatttcgatttcttggctttatatatcttgtggaaaggacgaaactaggtagagtatggtagcaatatctagagtattgctaccatactctacttttttcgagtagctagagaattcatggtaatagcgatgactaatacgtagatgtactgccaagtaggaaagtcccataaggtcatgtactgggcataatgccaggcgggccatttaccgtcattgacgtcaatagggggcgtacttggcatatgatacacttgatgtactgccaagtgggcagtttaccgtaaatagtccacccattgacgtcaatggaaagtccctattggcgttactatgggaacatacgtcattattgacgtcaatgggcgggggtcgttgggcggtcagccaggcgggccatttaccgtaagttatgtaacgcggaactccatatatgggctatgaactaatgaccccgtaattgattactattaataactagacccagctttcttgtacaaagttggcattataagaaagcattgcttatcaatttgttgcaacgaacaggtcactatcagtcaaaataaaatcattatttgccatccagctgatatcccctatagtgagtcgtattacatggtcatagctgtttcctggcagctctggcccgtgtctcaaaatctctgatgttacattgcacaagataaaaatatatcatcatgaacaataaaactgtctgcttacataaacagtaatacaaggggtgttatgagccatattcaacgggaaacgtcgaggccgcgattaaattccaacatggatgctgatttatatgggtataaatgggctcgcgataatgtcgggcaatcaggtgcgacaatctatcgcttgtatgggaagcccgatgcgccagagttgtttctgaaacatggcaaaggtagcgttgccaatgatgttacagatgagatggtcagactaaactggctgacggaatttatgcctcttccgaccatcaagcattttatccgtactcctgatgatgcatggttactcaccactgcgatccccggaaaaacagcattccaggtattagaagaatatcctgattcaggtgaaaatattgttgatgcgctggcagtgttcctgcgccggttgcattcgattcctgtttgtaattgtccttttaacagcgatcgcgtatttcgtctcgctcaggcgcaatcacgaatgaataacggtttggttgatgcgagtgattttgatgacgagcgtaatggctggcctgttgaacaagtctggaaagaaatgcataaacttttgccattctcaccggattcagtcgtcactcatggtgatttctcacttgataaccttatttttgacgaggggaaattaataggttgtattgatgttggacgagtcggaatcgcagaccgataccaggatcttgccatcctatggaactgcctcggtgagttttctccttcattacagaaacggctttttcaaaaatatggtattgataatcctgatatgaataaattgcagtttcatttgatgctcgatgagtttttctaatcagaattggttaattggttgtaacactggcagagcattacgctgacttgacgggacggcgcaagctcatgaccaaaatcccttaacgtgagttacgcgtcgttccactgagcgtcagaccccgtagaaaagatcaaaggatcttcttgagatcctttttttctgcgcgtaatctgctgcttgcaaacaaaaaaaccaccgctaccagcggtggtttgtttgccggatcaagagctaccaactctttttccgaaggtaactggcttcagcagagcgcagataccaaatactgtccttctagtgtagccgtagttaggccaccacttcaagaactctgtagcaccgcctacatacctcgctctgctaatcctgttaccagtggctgctgccagtggcgataagtcgtgtcttaccgggttggactcaagacgatagttaccggataaggcgcagcggtcgggctgaacggggggttcgtgcacacagcccagcttggagcgaacgacctacaccgaactgagatacctacagcgtgagcattgagaaagcgccacgcttcccgaagggagaaaggcggacaggtatccggtaagcggcagggtcggaacaggagagcgcacgagggagcttccagggggaaacgcctggtatctttatagtcctgtcgggtttcgccacctctgacttgagcgtcgatttttgtgatgctcgtcaggggggcggagcctatggaaaaacgccagcaacgcggcctttttacggttcctggccttttgctggccttttgct

SEQ ID NO: 45 - DNA, 3888 bp, Artificial Sequence
  pEQU6-shPDL1-H1-shSIRPalpha Vector
ctttcctgcgttatcccctgattctgtggataaccgtattaccgcctttgagtgagctgataccgctcgccgcagccgaacgaccgagcgcagcgagtcagtgagcgaggaagcggaagagcgcccaatacgcaaaccgcctctccccgcgcgttggccgattcattaatgcagctggcacgacaggtttcccgactggaaagcgggcagtgagcgcaacgcaattaatacgcgtaccgctagccaggaagagtttgtagaaacgcaaaaaggccatccgtcaggatggccttctgcttagtttgatgcctggcagtttatggcgggcgtcctgcccgccaccctccgggccgttgcttcacaacgttcaaatccgctcccggcggatttgtcctactcaggagagcgttcaccgacaaacaacagataaaacgaaaggcccagtcttccgactgagcctttcgttttatttgatgcctggcagttccctactctcgcgttaacgctagcatggatgttttcccagtcacgacgttgtaaaacgacggccagtcttaagctcgggccccaaataatgattttattttgactgatagtgacctgttcgttgcaacaaattgatgagcaatgcttttttataatgccaactttgtacaaaaaagcaggctttaaaggaaccaattcagtcgagaattggtaccatatttgcatgtcgctatgtgttctgggaaatcaccataaacgtgaaatgtctttggatttgggaatcttataagttctgtatgagaccactccctaggccaggtgaggaagttctatctagagtagaacttcctcacctggcttttttcgacagatctggcgcgccatagtggccagcggccgcaggtaagccagcccaggcctcgccctccagctcaaggcgggacaggtgccctagagtagcctgcatccagggacaggccccagccgggtgctgacacgtccacctccatctcttcctcaggtctgcccgggtggcatccctgtgacccctccccagtgcctctcctggccctggaagttgccactccagtgcccaccagccttgtcctaataaaattaagttgcatcattttgtctgactaggtgtccttctataatattatggggtggaggggggtggtatggagcaaggggcccaagttaacttgtttattgcagcttataatggttacaaataaagcaatagcatcacaaatttcacaaataaagcatttttttcactgcattctagttgtggtttgtccaaactcatcaatgtatcttatcatgtctggatccaaggtcgggcaggaagagggcctatttcccatgattccttcatatttgcatatacgatacaaggctgttagagagataattagaattaatttgactgtaaacacaaagatattagtacaaaatacgtgacgtagaaagtaataatttcttgggtagtttgcagttttaaaattatgttttaaaatggactatcatatgcttaccgtaacttgaaagtatttcgatttcttggctttatatatcttgtggaaaggacgaaactaggtagagtatggtagcaatatctagagtattgctaccatactctacttttttcgagtagctagagaattcatggtaatagcgatgactaatacgtagatgtactgccaagtaggaaagtcccataaggtcatgtactgggcataatgccaggcgggccatttaccgtcattgacgtcaatagggggcgtacttggcatatgatacacttgatgtactgccaagtgggcagtttaccgtaaatagtccacccattgacgtcaatggaaagtccctattggcgttactatgggaacatacgtcattattgacgtcaatgggcgggggtcgttgggcggtcagccaggcgggccatttaccgtaagttatgtaacgcggaactccatatatgggctatgaactaatgaccccgtaattgattactattaataactagacccagctttcttgtacaaagttggcattataagaaagcattgcttatcaatttgttgcaacgaacaggtcactatcagtcaaaataaaatcattatttgccatccagctgatatcccctatagtgagtcgtattacatggtcatagctgtttcctggcagctctggcccgtgtctcaaaatctctgatgttacattgcacaagataaaaatatatcatcatgaacaataaaactgtctgcttacataaacagtaatacaaggggtgttatgagccatattcaacgggaaacgtcgaggccgcgattaaattccaacatggatgctgatttatatgggtataaatgggctcgcgataatgtcgggcaatcaggtgcgacaatctatcgcttgtatgggaagcccgatgcgccagagttgtttctgaaacatggcaaaggtagcgttgccaatgatgttacagatgagatggtcagactaaactggctgacggaatttatgcctcttccgaccatcaagcattttatccgtactcctgatgatgcatggttactcaccactgcgatccccggaaaaacagcattccaggtattagaagaatatcctgattcaggtgaaaatattgttgatgcgctggcagtgttcctgcgccggttgcattcgattcctgtttgtaattgtccttttaacagcgatcgcgtatttcgtctcgctcaggcgcaatcacgaatgaataacggtttggttgatgcgagtgattttgatgacgagcgtaatggctggcctgttgaacaagtctggaaagaaatgcataaacttttgccattctcaccggattcagtcgtcactcatggtgatttctcacttgataaccttatttttgacgaggggaaattaataggttgtattgatgttggacgagtcggaatcgcagaccgataccaggatcttgccatcctatggaactgcctcggtgagttttctccttcattacagaaacggctttttcaaaaatatggtattgataatcctgatatgaataaattgcagtttcatttgatgctcgatgagtttttctaatcagaattggttaattggttgtaacactggcagagcattacgctgacttgacgggacggcgcaagctcatgaccaaaatcccttaacgtgagttacgcgtcgttccactgagcgtcagaccccgtagaaaagatcaaaggatcttcttgagatcctttttttctgcgcgtaatctgctgcttgcaaacaaaaaaaccaccgctaccagcggtggtttgtttgccggatcaagagctaccaactctttttccgaaggtaactggcttcagcagagcgcagataccaaatactgtccttctagtgtagccgtagttaggccaccacttcaagaactctgtagcaccgcctacatacctcgctctgctaatcctgttaccagtggctgctgccagtggcgataagtcgtgtcttaccgggttggactcaagacgatagttaccggataaggcgcagcggtcgggctgaacggggggttcgtgcacacagcccagcttggagcgaacgacctacaccgaactgagatacctacagcgtgagcattgagaaagcgccacgcttcccgaagggagaaaggcggacaggtatccggtaagcggcagggtcggaacaggagagcgcacgagggagcttccagggggaaacgcctggtatctttatagtcctgtcgggtttcgccacctctgacttgagcgtcgatttttgtgatgctcgtcaggggggcggagcctatggaaaaacgccagcaacgcggcctttttacggttcctggccttttgctggccttttgct

SEQ ID NO: 46 - DNA, 3888 bp, Artificial Sequence
  pEQU6-shPDL1-H1-shTREX1
ctttcctgcgttatcccctgattctgtggataaccgtattaccgcctttgagtgagctgataccgctcgccgcagccgaacgaccgagcgcagcgagtcagtgagcgaggaagcggaagagcgcccaatacgcaaaccgcctctccccgcgcgttggccgattcattaatgcagctggcacgacaggtttcccgactggaaagcgggcagtgagcgcaacgcaattaatacgcgtaccgctagccaggaagagtttgtagaaacgcaaaaaggccatccgtcaggatggccttctgcttagtttgatgcctggcagtttatggcgggcgtcctgcccgccaccctccgggccgttgcttcacaacgttcaaatccgctcccggcggatttgtcctactcaggagagcgttcaccgacaaacaacagataaaacgaaaggcccagtcttccgactgagcctttcgttttatttgatgcctggcagttccctactctcgcgttaacgctagcatggatgttttcccagtcacgacgttgtaaaacgacggccagtcttaagctcgggccccaaataatgattttattttgactgatagtgacctgttcgttgcaacaaattgatgagcaatgcttttttataatgccaactttgtacaaaaaagcaggctttaaaggaaccaattcagtcgagaattggtaccatatttgcatgtcgctatgtgttctgggaaatcaccataaacgtgaaatgtctttggatttgggaatcttataagttctgtatgagaccactccctaggcagcgcatgggcgtcaattctagagattgacgcccatgcgctgcttttttcgacagatctggcgcgccatagtggccagcggccgcaggtaagccagcccaggcctcgccctccagctcaaggcgggacaggtgccctagagtagcctgcatccagggacaggccccagccgggtgctgacacgtccacctccatctcttcctcaggtctgcccgggtggcatccctgtgacccctccccagtgcctctcctggccctggaagttgccactccagtgcccaccagccttgtcctaataaaattaagttgcatcattttgtctgactaggtgtccttctataatattatggggtggaggggggtggtatggagcaaggggcccaagttaacttgtttattgcagcttataatggttacaaataaagcaatagcatcacaaatttcacaaataaagcatttttttcactgcattctagttgtggtttgtccaaactcatcaatgtatcttatcatgtctggatccaaggtcgggcaggaagagggcctatttcccatgattccttcatatttgcatatacgatacaaggctgttagagagataattagaattaatttgactgtaaacacaaagatattagtacaaaatacgtgacgtagaaagtaataatttcttgggtagtttgcagttttaaaattatgttttaaaatggactatcatatgcttaccgtaacttgaaagtatttcgatttcttggctttatatatcttgtggaaaggacgaaactaggtagagtatggtagcaatatctagagtattgctaccatactctacttttttcgagtagctagagaattcatggtaatagcgatgactaatacgtagatgtactgccaagtaggaaagtcccataaggtcatgtactgggcataatgccaggcgggccatttaccgtcattgacgtcaatagggggcgtacttggcatatgatacacttgatgtactgccaagtgggcagtttaccgtaaatagtccacccattgacgtcaatggaaagtccctattggcgttactatgggaacatacgtcattattgacgtcaatgggcgggggtcgttgggcggtcagccaggcgggccatttaccgtaagttatgtaacgcggaactccatatatgggctatgaactaatgaccccgtaattgattactattaataactagacccagctttcttgtacaaagttggcattataagaaagcattgcttatcaatttgttgcaacgaacaggtcactatcagtcaaaataaaatcattatttgccatccagctgatatcccctatagtgagtcgtattacatggtcatagctgtttcctggcagctctggcccgtgtctcaaaatctctgatgttacattgcacaagataaaaatatatcatcatgaacaataaaactgtctgcttacataaacagtaatacaaggggtgttatgagccatattcaacgggaaacgtcgaggccgcgattaaattccaacatggatgctgatttatatgggtataaatgggctcgcgataatgtcgggcaatcaggtgcgacaatctatcgcttgtatgggaagcccgatgcgccagagttgtttctgaaacatggcaaaggtagcgttgccaatgatgttacagatgagatggtcagactaaactggctgacggaatttatgcctcttccgaccatcaagcattttatccgtactcctgatgatgcatggttactcaccactgcgatccccggaaaaacagcattccaggtattagaagaatatcctgattcaggtgaaaatattgttgatgcgctggcagtgttcctgcgccggttgcattcgattcctgtttgtaattgtccttttaacagcgatcgcgtatttcgtctcgctcaggcgcaatcacgaatgaataacggtttggttgatgcgagtgattttgatgacgagcgtaatggctggcctgttgaacaagtctggaaagaaatgcataaacttttgccattctcaccggattcagtcgtcactcatggtgatttctcacttgataaccttatttttgacgaggggaaattaataggttgtattgatgttggacgagtcggaatcgcagaccgataccaggatcttgccatcctatggaactgcctcggtgagttttctccttcattacagaaacggctttttcaaaaatatggtattgataatcctgatatgaataaattgcagtttcatttgatgctcgatgagtttttctaatcagaattggttaattggttgtaacactggcagagcattacgctgacttgacgggacggcgcaagctcatgaccaaaatcccttaacgtgagttacgcgtcgttccactgagcgtcagaccccgtagaaaagatcaaaggatcttcttgagatcctttttttctgcgcgtaatctgctgcttgcaaacaaaaaaaccaccgctaccagcggtggtttgtttgccggatcaagagctaccaactctttttccgaaggtaactggcttcagcagagcgcagataccaaatactgtccttctagtgtagccgtagttaggccaccacttcaagaactctgtagcaccgcctacatacctcgctctgctaatcctgttaccagtggctgctgccagtggcgataagtcgtgtcttaccgggttggactcaagacgatagttaccggataaggcgcagcggtcgggctgaacggggggttcgtgcacacagcccagcttggagcgaacgacctacaccgaactgagatacctacagcgtgagcattgagaaagcgccacgcttcccgaagggagaaaggcggacaggtatccggtaagcggcagggtcggaacaggagagcgcacgagggagcttccagggggaaacgcctggtatctttatagtcctgtcgggtttcgccacctctgacttgagcgtcgatttttgtgatgctcgtcaggggggcggagcctatggaaaaacgccagcaacgcggcctttttacggttcctggccttttgctggccttttgct

SEQ ID NO: 47 - DNA, 3888 bp, Artificial Sequence
  pEQU6-shPDL1-H1-shVISTA
ctttcctgcgttatcccctgattctgtggataaccgtattaccgcctttgagtgagctgataccgctcgccgcagccgaacgaccgagcgcagcgagtcagtgagcgaggaagcggaagagcgcccaatacgcaaaccgcctctccccgcgcgttggccgattcattaatgcagctggcacgacaggtttcccgactggaaagcgggcagtgagcgcaacgcaattaatacgcgtaccgctagccaggaagagtttgtagaaacgcaaaaaggccatccgtcaggatggccttctgcttagtttgatgcctggcagtttatggcgggcgtcctgcccgccaccctccgggccgttgcttcacaacgttcaaatccgctcccggcggatttgtcctactcaggagagcgttcaccgacaaacaacagataaaacgaaaggcccagtcttccgactgagcctttcgttttatttgatgcctggcagttccctactctcgcgttaacgctagcatggatgttttcccagtcacgacgttgtaaaacgacggccagtcttaagctcgggccccaaataatgattttattttgactgatagtgacctgttcgttgcaacaaattgatgagcaatgcttttttataatgccaactttgtacaaaaaagcaggctttaaaggaaccaattcagtcgagaattggtaccatatttgcatgtcgctatgtgttctgggaaatcaccataaacgtgaaatgtctttggatttgggaatcttataagttctgtatgagaccactccctaggaccaccatggcaacttcttctagagagaagttgccatggtggtcttttttcgacagatctggcgcgccatagtggccagcggccgcaggtaagccagcccaggcctcgccctccagctcaaggcgggacaggtgccctagagtagcctgcatccagggacaggccccagccgggtgctgacacgtccacctccatctcttcctcaggtctgcccgggtggcatccctgtgacccctccccagtgcctctcctggccctggaagttgccactccagtgcccaccagccttgtcctaataaaattaagttgcatcattttgtctgactaggtgtccttctataatattatggggtggaggggggtggtatggagcaaggggcccaagttaacttgtttattgcagcttataatggttacaaataaagcaatagcatcacaaatttcacaaataaagcatttttttcactgcattctagttgtggtttgtccaaactcatcaatgtatcttatcatgtctggatccaaggtcgggcaggaagagggcctatttcccatgattccttcatatttgcatatacgatacaaggctgttagagagataattagaattaatttgactgtaaacacaaagatattagtacaaaatacgtgacgtagaaagtaataatttcttgggtagtttgcagttttaaaattatgttttaaaatggactatcatatgcttaccgtaacttgaaagtatttcgatttcttggctttatatatcttgtggaaaggacgaaactaggtagagtatggtagcaatatctagagtattgctaccatactctacttttttcgagtagctagagaattcatggtaatagcgatgactaatacgtagatgtactgccaagtaggaaagtcccataaggtcatgtactgggcataatgccaggcgggccatttaccgtcattgacgtcaatagggggcgtacttggcatatgatacacttgatgtactgccaagtgggcagtttaccgtaaatagtccacccattgacgtcaatggaaagtccctattggcgttactatgggaacatacgtcattattgacgtcaatgggcgggggtcgttgggcggtcagccaggcgggccatttaccgtaagttatgtaacgcggaactccatatatgggctatgaactaatgaccccgtaattgattactattaataactagacccagctttcttgtacaaagttggcattataagaaagcattgcttatcaatttgttgcaacgaacaggtcactatcagtcaaaataaaatcattatttgccatccagctgatatcccctatagtgagtcgtattacatggtcatagctgtttcctggcagctctggcccgtgtctcaaaatctctgatgttacattgcacaagataaaaatatatcatcatgaacaataaaactgtctgcttacataaacagtaatacaaggggtgttatgagccatattcaacgggaaacgtcgaggccgcgattaaattccaacatggatgctgatttatatgggtataaatgggctcgcgataatgtcgggcaatcaggtgcgacaatctatcgcttgtatgggaagcccgatgcgccagagttgtttctgaaacatggcaaaggtagcgttgccaatgatgttacagatgagatggtcagactaaactggctgacggaatttatgcctcttccgaccatcaagcattttatccgtactcctgatgatgcatggttactcaccactgcgatccccggaaaaacagcattccaggtattagaagaatatcctgattcaggtgaaaatattgttgatgcgctggcagtgttcctgcgccggttgcattcgattcctgtttgtaattgtccttttaacagcgatcgcgtatttcgtctcgctcaggcgcaatcacgaatgaataacggtttggttgatgcgagtgattttgatgacgagcgtaatggctggcctgttgaacaagtctggaaagaaatgcataaacttttgccattctcaccggattcagtcgtcactcatggtgatttctcacttgataaccttatttttgacgaggggaaattaataggttgtattgatgttggacgagtcggaatcgcagaccgataccaggatcttgccatcctatggaactgcctcggtgagttttctccttcattacagaaacggctttttcaaaaatatggtattgataatcctgatatgaataaattgcagtttcatttgatgctcgatgagtttttctaatcagaattggttaattggttgtaacactggcagagcattacgctgacttgacgggacggcgcaagctcatgaccaaaatcccttaacgtgagttacgcgtcgttccactgagcgtcagaccccgtagaaaagatcaaaggatcttcttgagatcctttttttctgcgcgtaatctgctgcttgcaaacaaaaaaaccaccgctaccagcggtggtttgtttgccggatcaagagctaccaactctttttccgaaggtaactggcttcagcagagcgcagataccaaatactgtccttctagtgtagccgtagttaggccaccacttcaagaactctgtagcaccgcctacatacctcgctctgctaatcctgttaccagtggctgctgccagtggcgataagtcgtgtcttaccgggttggactcaagacgatagttaccggataaggcgcagcggtcgggctgaacggggggttcgtgcacacagcccagcttggagcgaacgacctacaccgaactgagatacctacagcgtgagcattgagaaagcgccacgcttcccgaagggagaaaggcggacaggtatccggtaagcggcagggtcggaacaggagagcgcacgagggagcttccagggggaaacgcctggtatctttatagtcctgtcgggtttcgccacctctgacttgagcgtcgatttttgtgatgctcgtcaggggggcggagcctatggaaaaacgccagcaacgcggcctttttacggttcctggccttttgctggccttttgct

SEQ ID NO: 48 - DNA, 1104 bp, Salmonella typhimurium
  Strain LT2 Aspartate-semialdehyde dehydrogenase (asd)
atgaaaaatgttggttttatcggctggcgcggaatggtcggctctgttctcatgcaacgcatggtagaggagcgcgatttcgacgctattcgccctgttttcttttctacctcccagtttggacaggcggcgcccaccttcggcgacacctccaccggcacgctacaggacgcttttgatctggatgcgctaaaagcgctcgatatcatcgtgacctgccagggcggcgattataccaacgaaatttatccaaagctgcgcgaaagcggatggcagggttactggattgatgcggcttctacgctgcgcatgaaagatgatgccattattattctcgacccggtcaaccaggacgtgattaccgacggcctgaacaatggcgtgaagacctttgtgggcggtaactgtaccgttagcctgatgttgatgtcgctgggcggtctctttgcccataatctcgttgactgggtatccgtcgcgacctatcaggccgcctccggcggcggcgcgcgccatatgcgcgagctgttaacccagatgggtcagttgtatggccatgtcgccgatgaactggcgacgccgtcttccgcaattcttgatattgaacgcaaagttacggcattgacccgcagcggcgagctgccggttgataactttggcgtaccgctggcgggaagcctgatcccctggatcgacaaacagctcgataacggccagagccgcgaagagtggaaaggccaggcggaaaccaacaagattctcaatactgcctctgtgattccggttgatggtttgtgtgtgcgcgtcggcgcgctgcgctgtcacagccaggcgttcaccatcaagctgaaaaaagaggtatccattccgacggtggaagaactgctggcggcacataatccgtgggcgaaagtggtgccgaacgatcgtgatatcactatgcgcgaattaaccccggcggcggtgaccggcacgttgactacgccggttggtcgtctgcgtaagctgaacatggggccagagttcttgtcggcgtttaccgtaggcgaccagttgttatggggcgccgccgagccgctgcgtcgaatgctgcgccagttggcg

SEQ ID NO: 49 - DNA, 861 bp, Salmonella typhimurium
  Strain LT2 TSX
atgaaaaaaactttactcgcagtcagcgcagcgctggcgctcacctcatcttttactgctaacgcagcagaaaatgatcagccgcagtatttgtccgactggtggcaccagagcgtaaacgtggtaggcagctaccatacccgtttctcgccgaaattgaacaacgacgtctatctggaatatgaagcatttgccaaaaaagactggtttgatttctacggctatatcgatattcccaaaacctttgattggggtaacggcaacgataaaggtatctggtccgacggttctccgctgttcatggaaatcgaaccgcgtttctcaattgataagctgaccggcgcagacctgagcttcggcccgtttaaagagtggtatttcgccaacaactacatctacgatatgggcgataacaaagccagccgccagagcacgtggtatatgggtctggggaccgatatcgacaccggcctgccgatgggtctgtcgctgaacgtgtatgcgaaatatcagtggcaaaactacggcgcgtccaatgaaaacgaatgggacggctaccgtttcaaagtgaaatacttcgtccccatcaccgatctgtggggcggtaaactgagctatatcggctttaccaactttgactggggatctgatttaggcgacgatccgaaccgtaccagcaactccatcgcttccagccatatcctggcgctgaactacgatcactggcactactcggtcgttgcgcgttacttccataacggcggacagtggcagaatggcgcaaaactgaactggggcgacggcgatttcagcgcgaaatctaccggctggggcggctacctggtcgtgggttacaacttc

SEQ ID NO: 50 - DNA, 864 bp, Homo sapiens
  programmed cell death protein 1 (PD-1)
atgcagatcccacaggcgccctggccagtcgtctgggcggtgctacaactgggctggcggccaggatggttcttagactccccagacaggccctggaacccccccaccttctccccagccctgctcgtggtgaccgaaggggacaacgccaccttcacctgcagcttctccaacacatcggagagcttcgtgctaaactggtaccgcatgagccccagcaaccagacggacaagctggccgccttccccgaggaccgcagccagcccggccaggactgccgcttccgtgtcacacaactgcccaacgggcgtgacttccacatgagcgtggtcagggcccggcgcaatgacagcggcacctacctctgtggggccatctccctggcccccaaggcgcagatcaaagagagcctgcgggcagagctcagggtgacagagagaagggcagaagtgcccacagcccaccccagcccctcacccaggccagccggccagttccaaaccctggtggttggtgtcgtgggcggcctgctgggcagcctggtgctgctagtctgggtcctggccgtcatctgctcccgggccgcacgagggacaataggagccaggcgcaccggccagcccctgaaggaggacccctcagccgtgcctgtgttctctgtggactatggggagctggatttccagtggcgagagaagaccccggagccccccgtgccctgtgtccctgagcagacggagtatgccaccattgtctttcctagcggaatgggcacctcatcccccgcccgcaggggctcagctgacggccctcggagtgcccagccactgaggcctgaggatggacactgctcttggcccctc

SEQ ID NO: 51 - DNA, 933 bp, Homo sapiens
  programmed cell death protein 2 (PD-2), isoform 1
atggctgccgccggggccaggcctgtggagctgggcttcgccgagtcggcgccggcgtggcgactgcgcagcgagcagttccccagcaaggtgtatgcgccgctgcctggccgcccggacgccttccaccgctgcatcttcctcttctgctgccgcgagcagccgtgctgtgccggcctgcgagtttttaggaatcaactacccaggaaaaacgatttttactcatatgagccaccttctgagaatcctcccccagaaacaggagaatcagtgtgtctccagcttaagtctggtgctcatctctgcagggtttgtggctgtttaggccccaaaacgtgctccagatgccacaaagcatattactgcagcaaggagcatcagaccctagactggagattgggacataagcaggcttgtgcacaaccagatcatctggaccatataattccagaccacaacttcctttttccagaatttgaaattgtaatagaaacagaagatgagattatgcctgaggttgtggaaaaggaagattactcagagattatagggagcatgggtgaagcacttgaggaagaactggattccatggcaaaacatgaatccagggaagataaaatttttcagaagtttaaaactcagatagcccttgaaccagaacagattcttagatatggcagaggtattgcccccatctggatttctggtgaaaatattcctcaagaaaaggatattccagattgcccctgtggtgccaagagaatattggaattccaggtcatgcctcagctcctaaactacctgaaggctgacagactgggcaagagcattgactggggcatcctggctgtcttcacctgtgctgagagctgcagcttgggtactggctatacagaagaatttgtgtggaagcaggatgtaacagatacaccg

SEQ ID NO: 52 - DNA, 819 bp, Homo sapiens
  programmed death-ligand 2 (PD-L2), isoform 1
atgatcttcctcctgctaatgttgagcctggaattgcagcttcaccagatagcagctttattcacagtgacagtccctaaggaactgtacataatagagcatggcagcaatgtgaccctggaatgcaactttgacactggaagtcatgtgaaccttggagcaataacagccagtttgcaaaaggtggaaaatgatacatccccacaccgtgaaagagccactttgctggaggagcagctgcccctagggaaggcctcgttccacatacctcaagtccaagtgagggacgaaggacagtaccaatgcataatcatctatggggtcgcctgggactacaagtacctgactctgaaagtcaaagcttcctacaggaaaataaacactcacatcctaaaggttccagaaacagatgaggtagagctcacctgccaggctacaggttatcctctggcagaagtatcctggccaaacgtcagcgttcctgccaacaccagccactccaggacccctgaaggcctctaccaggtcaccagtgttctgcgcctaaagccaccccctggcagaaacttcagctgtgtgttctggaatactcacgtgagggaacttactttggccagcattgaccttcaaagtcagatggaacccaggacccatccaacttggctgcttcacattttcatcccctcctgcatcattgctttcattttcatagccacagtgatagccctaagaaaacaactctgtcaaaagctgtattcttcaaaagacacaacaaaaagacctgtcaccacaacaaagagggaagtgaacagtgctatc

SEQ ID NO: 53 - DNA, 669 bp, Homo sapiens
  cytotoxic T-lymphocyte-associated protein 4 (CTLA-4), isoform 1
atggcttgccttggatttcagcggcacaaggctcagctgaacctggctaccaggacctggccctgcactctcctgttttttcttctcttcatccctgtcttctgcaaagcaatgcacgtggcccagcctgctgtggtactggccagcagccgaggcatcgccagctttgtgtgtgagtatgcatctccaggcaaagccactgaggtccgggtgacagtgcttcggcaggctgacagccaggtgactgaagtctgtgcggcaacctacatgatggggaatgagttgaccttcctagatgattccatctgcacgggcacctccagtggaaatcaagtgaacctcactatccaaggactgagggccatggacacgggactctacatctgcaaggtggagctcatgtacccaccgccatactacctgggcataggcaacggaacccagatttatgtaattgatccagaaccgtgcccagattctgacttcctcctctggatccttgcagcagttagttcggggttgtttttttatagctttctcctcacagctgtttctttgagcaaaatgctaaagaaaagaagccctcttacaacaggggtctatgtgaaaatgcccccaacagagccagaatgtgaaaagcaatttcagccttattttattcccatcaat

SEQ ID NO: 54 - DNA, 969 bp, Homo sapiens
  CD47 transcript variant 1
atgtggcccctggtagcggcgctgttgctgggctcggcgtgctgcggatcagctcagctactatttaataaaacaaaatctgtagaattcacgttttgtaatgacactgtcgtcattccatgctttgttactaatatggaggcacaaaacactactgaagtatacgtaaagtggaaatttaaaggaagagatatttacacctttgatggagctctaaacaagtccactgtccccactgactttagtagtgcaaaaattgaagtctcacaattactaaaaggagatgcctctttgaagatggataagagtgatgctgtctcacacacaggaaactacacttgtgaagtaacagaattaaccagagaaggtgaaacgatcatcgagctaaaatatcgtgttgtttcatggttttctccaaatgaaaatattcttattgttattttcccaatttttgctatactcctgttctggggacagtttggtattaaaacacttaaatatagatccggtggtatggatgagaaaacaattgctttacttgttgctggactagtgatcactgtcattgtcattgttggagccattcttttcgtcccaggtgaatattcattaaagaatgctactggccttggtttaattgtgacttctacagggatattaatattacttcactactatgtgtttagtacagcgattggattaacctccttcgtcattgccatattggttattcaggtgatagcctatatcctcgctgtggttggactgagtctctgtattgcggcgtgtataccaatgcatggccctcttctgatttcaggtttgagtatcttagctctagcacaattacttggactagtttatatgaaatttgtggcttccaatcagaagactatacaacctcctaggaaagctgtagaggaaccccttaatgcattcaaagaatcaaaaggaatgatgaatgatgaa

SEQ ID NO: 55 - DNA, 1209 bp, Homo sapiens
  indoleamine 2,3-dioxygenase (IDO) 1
atggcacacgctatggaaaactcctggacaatcagtaaagagtaccatattgatgaagaagtgggctttgctctgccaaatccacaggaaaatctacctgatttttataatgactggatgttcattgctaaacatctgcctgatctcatagagtctggccagcttcgagaaagagttgagaagttaaacatgctcagcattgatcatctcacagaccacaagtcacagcgccttgcacgtctagttctgggatgcatcaccatggcatatgtgtggggcaaaggtcatggagatgtccgtaaggtcttgccaagaaatattgctgttccttactgccaactctccaagaaactggaactgcctcctattttggtttatgcagactgtgtcttggcaaactggaagaaaaaggatcctaataagcccctgacttatgagaacatggacgttttgttctcatttcgtgatggagactgcagtaaaggattcttcctggtctctctattggtggaaatagcagctgcttctgcaatcaaagtaattcctactgtattcaaggcaatgcaaatgcaagaacgggacactttgctaaaggcgctgttggaaatagcttcttgcttggagaaagcccttcaagtgtttcaccaaatccacgatcatgtgaacccaaaagcatttttcagtgttcttcgcatatatttgtctggctggaaaggcaacccccagctatcagacggtctggtgtatgaaaggttctgggaagacccaaaggagtttgcagggggcagtgcaggccaaagcagcgtctttcagtgctttgacgtcctgctgggcatccagcagactgctggtggaggacatgctgctcagttcctccaggacatgagaagatatatgccaccagctcacaggaacttcctgtgctcattagagtcaaatccctcagtccgtgagtttgtcctttcaaaaggtgatgctggcctgcgggaagcttatgacgcctgtgtgaaagctctggtctccctgaggagctaccatctgcaaatcgtgactaagtacatcctgattcctgcaagccagcagccaaaggagaataagacctctgaagacccttcaaaactggaagccaaaggaactggaggcactgatttaatgaatttcctgaagactgtaagaagtacaactgagaaatcccttttgaaggaaggt

SEQ ID NO: 56 - DNA, 1260 bp, Homo sapiens
  indoleamine 2,3-dioxygenase (IDO) 2
atgttgcattttcattattatgatacttcaaacaaaataatggagccccacagaccgaatgtgaagacagcagtgccattgtctttggaaagctatcacatatctgaagagtatggctttcttcttccagattctctgaaagaacttccagatcattataggccttggatggaaattgccaacaaacttcctcaattgattgatgctcaccagcttcaagctcatgtggacaagatgcccctgctgagctgccagttcctgaagggtcaccgggagcagcgcctggcccacctggtcctgagcttcctcaccatgggttatgtctggcaggaaggagaggcgcagcctgcagaggtcctgccaaggaatcttgcccttccatttgtcgaagtctccaggaacttggggctccctcctatcctggtccactcagacttggtgctgacgaactggaccaaaaaagatccagacggattcctggaaattgggaacctggagaccatcatctcatttcctgggggagagagcctgcatggttttatactggtgactgctttggtagagaaagaagcagtgcctgggataaaggctcttgttcaggccacgaatgctatcttgcagcccaaccaggaggccctgctccaagccctgcagcgactgagactgtctattcaggacatcaccaaaaccttaggacagatgcatgattatgtagatccagacatattttatgcaggcatccggatctttctctctggatggaaagacaacccagcaatgcctgcagggctgatgtatgaaggagtttcccaagagcccctgaaatactccggcgggagtgcagctcagagcacagtgcttcatgcctttgatgagttcttaggcattcgtcatagcaaggaaagtggtgactttctgtacagaatgagggattacatgcctccttcccataaggccttcatagaagacatccactcagcaccttccctgagggactacatcctgtcatctggacaggaccacttgctgacagcttataaccagtgtgtgcaggccctggcagagctgcggagctatcacatcaccatggtcaccaaatacctcatcacagctgcagccaaggcaaagcatgggaagccaaaccatctcccagggcctcctcaggctttaaaagacaggggcacaggtggaaccgcagttatgagctttcttaagagtgtcagggataagaccttggagtcaatccttcacccacgtggt

SEQ ID NO: 57 - DNA, 2310 bp, Homo sapiens
  signal transducer and activator of transcription 3 (STAT3)
atggcccaatggaatcagctacagcagcttgacacacggtacctggagcagctccatcagctctacagtgacagcttcccaatggagctgcggcagtttctggccccttggattgagagtcaagattgggcatatgcggccagcaaagaatcacatgccactttggtgtttcataatctcctgggagagattgaccagcagtatagccgcttcctgcaagagtcgaatgttctctatcagcacaatctacgaagaatcaagcagtttcttcagagcaggtatcttgagaagccaatggagattgcccggattgtggcccggtgcctgtgggaagaatcacgccttctacagactgcagccactgcggcccagcaagggggccaggccaaccaccccacagcagccgtggtgacggagaagcagcagatgctggagcagcaccttcaggatgtccggaagagagtgcaggatctagaacagaaaatgaaagtggtagagaatctccaggatgactttgatttcaactataaaaccctcaagagtcaaggagacatgcaagatctgaatggaaacaaccagtcagtgaccaggcagaagatgcagcagctggaacagatgctcactgcgctggaccagatgcggagaagcatcgtgagtgagctggcggggcttttgtcagcgatggagtacgtgcagaaaactctcacggacgaggagctggctgactggaagaggcggcaacagattgcctgcattggaggcccgcccaacatctgcctagatcggctagaaaactggataacgtcattagcagaatctcaacttcagacccgtcaacaaattaagaaactggaggagttgcagcaaaaagtttcctacaaaggggaccccattgtacagcaccggccgatgctggaggagagaatcgtggagctgtttagaaacttaatgaaaagtgcctttgtggtggagcggcagccctgcatgcccatgcatcctgaccggcccctcgtcatcaagaccggcgtccagttcactactaaagtcaggttgctggtcaaattccctgagttgaattatcagcttaaaattaaagtgtgcattgacaaagactctggggacgttgcagctctcagaggatcccggaaatttaacattctgggcacaaacacaaaagtgatgaacatggaagaatccaacaacggcagcctctctgcagaattcaaacacttgaccctgagggagcagagatgtgggaatgggggccgagccaattgtgatgcttccctgattgtgactgaggagctgcacctgatcacctttgagaccgaggtgtatcaccaaggcctcaagattgacctagagacccactccttgccagttgtggtgatctccaacatctgtcagatgccaaatgcctgggcgtccatcctgtggtacaacatgctgaccaacaatcccaagaatgtaaacttttttaccaagcccccaattggaacctgggatcaagtggccgaggtcctgagctggcagttctcctccaccaccaagcgaggactgagcatcgagcagctgactacactggcagagaaactcttgggacctggtgtgaattattcagggtgtcagatcacatgggctaaattttgcaaagaaaacatggctggcaagggcttctccttctgggtctggctggacaatatcattgaccttgtgaaaaagtacatcctggccctttggaacgaagggtacatcatgggctttatcagtaaggagcgggagcgggccatcttgagcactaagcctccaggcaccttcctgctaagattcagtgaaagcagcaaagaaggaggcgtcactttcacttgggtggagaaggacatcagcggtaagacccagatccagtccgtggaaccatacacaaagcagcagctgaacaacatgtcatttgctgaaatcatcatgggctataagatcatggatgctaccaatatcctggtgtctccactggtctatctctatcctgacattcccaaggaggaggcattcggaaagtattgtcggccagagagccaggagcatcctgaagctgacccaggtagcgctgccccatacctgaagaccaagtttatctgtgtgacaccaacgacctgcagcaataccattgacctgccgatgtccccccgcactttagattcattgatgcagtttggaaataatggtgaaggtgctgaaccctcagcaggagggcagtttgagtccctcacctttgacatggagttgacctcggagtgcgctacctcccccatg

SEQ ID NO: 58 - DNA, 1575 bp, Homo sapiens
  lymphocyte-activation gene 3 (LAG3)
atgtgggaggctcagttcctgggcttgctgtttctgcagccgctttgggtggctccagtgaagcctctccagccaggggctgaggtcccggtggtgtgggcccaggagggggctcctgcccagctcccctgcagccccacaatccccctccaggatctcagccttctgcgaagagcaggggtcacttggcagcatcagccagacagtggcccgcccgctgccgcccccggccatcccctggcccccggccctcacccggcggcgccctcctcctgggggcccaggccccgccgctacacggtgctgagcgtgggtcccggaggcctgcgcagcgggaggctgcccctgcagccccgcgtccagctggatgagcgcggccggcagcgcggggacttctcgctatggctgcgcccagcccggcgcgcggacgccggcgagtaccgcgccgcggtgcacctcagggaccgcgccctctcctgccgcctccgtctgcgcctgggccaggcctcgatgactgccagccccccaggatctctcagagcctccgactgggtcattttgaactgctccttcagccgccctgaccgcccagcctctgtgcattggttccggaaccggggccagggccgagtccctgtccgggagtccccccatcaccacttagcggaaagcttcctcttcctgccccaagtcagccccatggactctgggccctggggctgcatcctcacctacagagatggcttcaacgtctccatcatgtataacctcactgttctgggtctggagcccccaactcccttgacagtgtacgctggagcaggttccagggtggggctgccctgccgcctgcctgctggtgtggggacccggtctttcctcactgccaagtggactcctcctgggggaggccctgacctcctggtgactggagacaatggcgactttacccttcgactagaggatgtgagccaggcccaggctgggacctacacctgccatatccatctgcaggaacagcagctcaatgccactgtcacattggcaatcatcacagtgactcccaaatcctttgggtcacctggatccctggggaagctgctttgtgaggtgactccagtatctggacaagaacgctttgtgtggagctctctggacaccccatcccagaggagtttctcaggaccttggctggaggcacaggaggcccagctcctttcccagccttggcaatgccagctgtaccagggggagaggcttcttggagcagcagtgtacttcacagagctgtctagcccaggtgcccaacgctctgggagagccccaggtgccctcccagcaggccacctcctgctgtttctcatccttggtgtcctttctctgctccttttggtgactggagcctttggctttcacctttggagaagacagtggcgaccaagacgattttctgccttagagcaagggattcaccctccgcaggctcagagcaagatagaggagctggagcaagaaccggagccggagccggagccggaaccggagcccgagcccgagcccgagccggagcagctc

SEQ ID NO: 59 - DNA, 903 bp, Homo sapiens
  T cell immunoglobulin and mucin-domain containing-3 (TIM-3)
atgttttcacatcttccctttgactgtgtcctgctgctgctgctgctactacttacaaggtcctcagaagtggaatacagagcggaggtcggtcagaatgcctatctgccctgcttctacaccccagccgccccagggaacctcgtgcccgtctgctggggcaaaggagcctgtcctgtgtttgaatgtggcaacgtggtgctcaggactgatgaaagggatgtgaattattggacatccagatactggctaaatggggatttccgcaaaggagatgtgtccctgaccatagagaatgtgactctagcagacagtgggatctactgctgccggatccaaatcccaggcataatgaatgatgaaaaatttaacctgaagttggtcatcaaaccagccaaggtcacccctgcaccgactcggcagagagacttcactgcagcctttccaaggatgcttaccaccaggggacatggcccagcagagacacagacactggggagcctccctgatataaatctaacacaaatatccacattggccaatgagttacgggactctagattggccaatgacttacgggactctggagcaaccatcagaataggcatctacatcggagcagggatctgtgctgggctggctctggctcttatcttcggcgctttaattttcaaatggtattctcatagcaaagagaagatacagaatttaagcctcatctctttggccaacctccctccctcaggattggcaaatgcagtagcagagggaattcgctcagaagaaaacatctataccattgaagagaacgtatatgaagtggaggagcccaatgagtattattgctatgtcagcagcaggcagcaaccctcacaacctttgggttgtcgctttgcaatgcca

SEQ ID NO: 60 - DNA, 732 bp, Homo sapiens
  T cell immunoreceptor with Ig and ITIM domains (TIGIT), isoform 1
atgcgctggtgtctcctcctgatctgggcccaggggctgaggcaggctcccctcgcctcaggaatgatgacaggcacaatagaaacaacggggaacatttctgcagagaaaggtggctctatcatcttacaatgtcacctctcctccaccacggcacaagtgacccaggtcaactgggagcagcaggaccagcttctggccatttgtaatgctgacttggggtggcacatctccccatccttcaaggatcgagtggccccaggtcccggcctgggcctcaccctccagtcgctgaccgtgaacgatacaggggagtacttctgcatctatcacacctaccctgatgggacgtacactgggagaatcttcctggaggtcctagaaagctcagtggctgagcacggtgccaggttccagattccattgcttggagccatggccgcgacgctggtggtcatctgcacagcagtcatcgtggtggtcgcgttgactagaaagaagaaagccctcagaatccattctgtggaaggtgacctcaggagaaaatcagctggacaggaggaatggagccccagtgctccctcacccccaggaagctgtgtccaggcagaagctgcacctgctgggctctgtggagagcagcggggagaggactgtgccgagctgcatgactacttcaatgtcctgagttacagaagcctgggtaactgcagcttcttcacagagactggt

SEQ ID NO: 61 - DNA, 1065 bp, Homo sapiens
  GALECTIN-9/LGALS9, isoform 1
atggccttcagcggttcccaggctccctacctgagtccagctgtccccttttctgggactattcaaggaggtctccaggacggacttcagatcactgtcaatgggaccgttctcagctccagtggaaccaggtttgctgtgaactttcagactggcttcagtggaaatgacattgccttccacttcaaccctcggtttgaagatggagggtacgtggtgtgcaacacgaggcagaacggaagctgggggcccgaggagaggaagacacacatgcctttccagaaggggatgccctttgacctctgcttcctggtgcagagctcagatttcaaggtgatggtgaacgggatcctcttcgtgcagtacttccaccgcgtgcccttccaccgtgtggacaccatctccgtcaatggctctgtgcagctgtcctacatcagcttccagaacccccgcacagtccctgttcagcctgccttctccacggtgccgttctcccagcctgtctgtttcccacccaggcccagggggcgcagacaaaaacctcccggcgtgtggcctgccaacccggctcccattacccagacagtcatccacacagtgcagagcgcccctggacagatgttctctactcccgccatcccacctatgatgtacccccaccccgcctatccgatgcctttcatcaccaccattctgggagggctgtacccatccaagtccatcctcctgtcaggcactgtcctgcccagtgctcagaggttccacatcaacctgtgctctgggaaccacatcgccttccacctgaacccccgttttgatgagaatgctgtggtccgcaacacccagatcgacaactcctgggggtctgaggagcgaagtctgccccgaaaaatgcccttcgtccgtggccagagcttctcagtgtggatcttgtgtgaagctcactgcctcaaggtggccgtggatggtcagcacctgtttgaatactaccatcgcctgaggaacctgcccaccatcaacagactggaagtggggggcgacatccagctgacccatgtgcagaca

SEQ ID NO: 62 - DNA, 720 bp, Homo sapiens
  LIGHT/TNSF14
atggaggagagtgtcgtacggccctcagtgtttgtggtggatggacagaccgacatcccattcacgaggctgggacgaagccaccggagacagtcgtgcagtgtggcccgggtgggtctgggtctcttgctgttgctgatgggggccgggctggccgtccaaggctggttcctcctgcagctgcactggcgtctaggagagatggtcacccgcctgcctgacggacctgcaggctcctgggagcagctgatacaagagcgaaggtctcacgaggtcaacccagcagcgcatctcacaggggccaactccagcttgaccggcagcggggggccgctgttatgggagactcagctgggcctggccttcctgaggggcctcagctaccacgatggggcccttgtggtcaccaaagctggctactactacatctactccaaggtgcagctgggcggtgtgggctgcccgctgggcctggccagcaccatcacccacggcctctacaagcgcacaccccgctaccccgaggagctggagctgttggtcagccagcagtcaccctgcggacgggccaccagcagctcccgggtctggtgggacagcagcttcctgggtggtgtggtacacctggaggctggggagaaggtggtcgtccgtgtgctggatgaacgcctggttcgactgcgtgatggtacccggtcttacttcggggctttcatggtg

SEQ ID NO: 63 - DNA, 849 bp, Homo sapiens
  HVEM/TNSFR14 (receptor for LIGHT ligand)
atggagcctcctggagactgggggcctcctccctggagatccacccccaaaaccgacgtcttgaggctggtgctgtatctcaccttcctgggagccccctgctacgccccagctctgccgtcctgcaaggaggacgagtacccagtgggctccgagtgctgccccaagtgcagtccaggttatcgtgtgaaggaggcctgcggggagctgacgggcacagtgtgtgaaccctgccctccaggcacctacattgcccacctcaatggcctaagcaagtgtctgcagtgccaaatgtgtgacccagccatgggcctgcgcgcgagccggaactgctccaggacagagaacgccgtgtgtggctgcagcccaggccacttctgcatcgtccaggacggggaccactgcgccgcgtgccgcgcttacgccacctccagcccgggccagagggtgcagaagggaggcaccgagagtcaggacaccctgtgtcagaactgccccccggggaccttctctcccaatgggaccctggaggaatgtcagcaccagaccaagtgcagctggctggtgacgaaggccggagctgggaccagcagctcccactgggtatggtggtttctctcagggagcctcgtcatcgtcattgtttgctccacagttggcctaatcatatgtgtgaaaagaagaaagccaaggggtgatgtagtcaaggtgatcgtctccgtccagcggaaaagacaggaggcagaaggtgaggccacagtcattgaggccctgcaggcccctccggacgtcaccacggtggccgtggaggagacaataccctcattcacggggaggagcccaaaccac

SEQ ID NO: 64 - DNA, 660 bp, Homo sapiens
  CD28
atgctcaggctgctcttggctctcaacttattcccttcaattcaagtaacaggaaacaagattttggtgaagcagtcgcccatgcttgtagcgtacgacaatgcggtcaaccttagctgcaagtattcctacaatctcttctcaagggagttccgggcatcccttcacaaaggactggatagtgctgtggaagtctgtgttgtatatgggaattactcccagcagcttcaggtttactcaaaaacggggttcaactgtgatgggaaattgggcaatgaatcagtgacattctacctccagaatttgtatgttaaccaaacagatatttacttctgcaaaattgaagttatgtatcctcctccttacctagacaatgagaagagcaatggaaccattatccatgtgaaagggaaacacctttgtccaagtcccctatttcccggaccttctaagcccttttgggtgctggtggtggttggtggagtcctggcttgctatagcttgctagtaacagtggcctttattattttctgggtgaggagtaagaggagcaggctcctgcacagtgactacatgaacatgactccccgccgccccgggcccacccgcaagcattaccagccctatgccccaccacgcgacttcgcagcctatcgctcc

SEQ ID NO: 65 - DNA, 1578 bp, Homo sapiens
  carcinoembryonic antigen-related cell adhesion molecule 1 (CEACAM1, or CD66a)
atggggcacctctcagccccacttcacagagtgcgtgtaccctggcaggggcttctgctcacagcctcacttctaaccttctggaacccgcccaccactgcccagctcactactgaatccatgccattcaatgttgcagaggggaaggaggttcttctccttgtccacaatctgccccagcaactttttggctacagctggtacaaaggggaaagagtggatggcaaccgtcaaattgtaggatatgcaataggaactcaacaagctaccccagggcccgcaaacagcggtcgagagacaatataccccaatgcatccctgctgatccagaacgtcacccagaatgacacaggattctacaccctacaagtcataaagtcagatcttgtgaatgaagaagcaactggacagttccatgtatacccggagctgcccaagccctccatctccagcaacaactccaaccctgtggaggacaaggatgctgtggccttcacctgtgaacctgagactcaggacacaacctacctgtggtggataaacaatcagagcctcccggtcagtcccaggctgcagctgtccaatggcaacaggaccctcactctactcagtgtcacaaggaatgacacaggaccctatgagtgtgaaatacagaacccagtgagtgcgaaccgcagtgacccagtcaccttgaatgtcacctatggcccggacacccccaccatttccccttcagacacctattaccgtccaggggcaaacctcagcctctcctgctatgcagcctctaacccacctgcacagtactcctggcttatcaatggaacattccagcaaagcacacaagagctctttatccctaacatcactgtgaataatagtggatcctatacctgccacgccaataactcagtcactggctgcaacaggaccacagtcaagacgatcatagtcactgagctaagtccagtagtagcaaagccccaaatcaaagccagcaagaccacagtcacaggagataaggactctgtgaacctgacctgctccacaaatgacactggaatctccatccgttggttcttcaaaaaccagagtctcccgtcctcggagaggatgaagctgtcccagggcaacaccaccctcagcataaaccctgtcaagagggaggatgctgggacgtattggtgtgaggtcttcaacccaatcagtaagaaccaaagcgaccccatcatgctgaacgtaaactataatgctctaccacaagaaaatggcctctcacctggggccattgctggcattgtgattggagtagtggccctggttgctctgatagcagtagccctggcatgttttctgcatttcgggaagaccggcagggcaagcgaccagcgtgatctcacagagcacaaaccctcagtctccaaccacactcaggaccactccaatgacccacctaacaagatgaatgaagttacttattctaccctgaactttgaagcccagcaacccacacaaccaacttcagcctccccatccctaacagccacagaaataatttattcagaagtaaaaaagcag

SEQ ID NO: 66 - DNA, 864 bp, Homo sapiens
  CD80/B7-1
atgggccacacacggaggcagggaacatcaccatccaagtgtccatacctcaatttctttcagctcttggtgctggctggtctttctcacttctgttcaggtgttatccacgtgaccaaggaagtgaaagaagtggcaacgctgtcctgtggtcacaatgtttctgttgaagagctggcacaaactcgcatctactggcaaaaggagaagaaaatggtgctgactatgatgtctggggacatgaatatatggcccgagtacaagaaccggaccatctttgatatcactaataacctctccattgtgatcctggctctgcgcccatctgacgagggcacatacgagtgtgttgttctgaagtatgaaaaagacgctttcaagcgggaacacctggctgaagtgacgttatcagtcaaagctgacttccctacacctagtatatctgactttgaaattccaacttctaatattagaaggataatttgctcaacctctggaggttttccagagcctcacctctcctggttggaaaatggagaagaattaaatgccatcaacacaacagtttcccaagatcctgaaactgagctctatgctgttagcagcaaactggatttcaatatgacaaccaaccacagcttcatgtgtctcatcaagtatggacatttaagagtgaatcagaccttcaactggaatacaaccaagcaagagcattttcctgataacctgctcccatcctgggccattaccttaatctcagtaaatggaatttttgtgatatgctgcctgacctactgctttgccccaagatgcagagagagaaggaggaatgagagattgagaagggaaagtgtacgccctgta

SEQ ID NO: 67 - DNA, 995 bp, Homo sapiens
  CD86/B7-2
cagccaaaatggatccccagtgcactatgggactgagtaacattctctttgtgatggccttcctgctctctggtgctgctcctctgaagattcaagcttatttcaatgagactgcagacctgccatgccaatttgcaaactctcaaaaccaaagcctgagtgagctagtagtattttggcaggaccaggaaaacttggttctgaatgaggtatacttaggcaaagagaaatttgacagtgttcattccaagtatatgggccgcacaagttttgattcggacagttggaccctgagacttcacaatcttcagatcaaggacaagggcttgtatcaatgtatcatccatcacaaaaagcccacaggaatgattcgcatccaccagatgaattctgaactgtcagtgcttgctaacttcagtcaacctgaaatagtaccaatttctaatataacagaaaatgtgtacataaatttgacctgctcatctatacacggttacccagaacctaagaagatgagtgttttgctaagaaccaagaattcaactatcgagtatgatggtattatgcagaaatctcaagataatgtcacagaactgtacgacgtttccatcagcttgtctgtttcattccctgatgttacgagcaatatgaccatcttctgtattctggaaactgacaagacgcggcttttatcttcacctttctctatagagcttgaggaccctcagcctcccccagaccacattccttggattacagctgtacttccaacagttattatatgtgtgatggttttctgtctaattctatggaaatggaagaagaagaagcggcctcgcaactcttataaatgtggaaccaacacaatggagagggaagagagtgaacagaccaagaaaagagaaaaaatccatatacctgaaagatctgatgaagcccagcgtgtttttaaaagttcgaagacatcttcatgcgacaaaagtgatacatgtttt

SEQ ID NO: 68 - DNA, 1095 bp, Homo sapiens
  CD244/2B4
atgctggggcaagtggtcaccctcatactcctcctgctcctcaaggtgtatcagggcaaaggatgccagggatcagctgaccatgtggttagcatctcgggagtgcctcttcagttacaaccaaacagcatacagacgaaggttgacagcattgcatggaagaagttgctgccctcacaaaatggatttcatcacatattgaagtgggagaatggctctttgccttccaatacttccaatgatagattcagttttatagtcaagaacttgagtcttctcatcaaggcagctcagcagcaggacagtggcctctactgcctggaggtcaccagtatatctggaaaagttcagacagccacgttccaggtttttgtatttgataaagttgagaaaccccgcctacaggggcaggggaagatcctggacagagggagatgccaagtggctctgtcttgcttggtctccagggatggcaatgtgtcctatgcttggtacagagggagcaagctgatccagacagcagggaacctcacctacctggacgaggaggttgacattaatggcactcacacatatacctgcaatgtcagcaatcctgttagctgggaaagccacaccctgaatctcactcaggactgtcagaatgcccatcaggaattcagattttggccgtttttggtgatcatcgtgattctaagcgcactgttccttggcacccttgcctgcttctgtgtgtggaggagaaagaggaaggagaagcagtcagagaccagtcccaaggaatttttgacaatttacgaagatgtcaaggatctgaaaaccaggagaaatcacgagcaggagcagacttttcctggaggggggagcaccatctactctatgatccagtcccagtcttctgctcccacgtcacaagaacctgcatatacattatattcattaattcagccttccaggaagtctggatccaggaagaggaaccacagcccttccttcaatagcactatctatgaagtgattggaaagagtcaacctaaagcccagaaccctgctcgattgagccgcaaagagctggagaactttgatgtttattcc

SEQ ID NO: 69 - DNA, 1251 bp, Homo sapiens
  CD155/PVR
atggcccgagccatggccgccgcgtggccgctgctgctggtggcgctactggtgctgtcctggccacccccaggaaccggggacgtcgtcgtgcaggcgcccacccaggtgcccggcttcttgggcgactccgtgacgctgccctgctacctacaggtgcccaacatggaggtgacgcatgtgtcacagctgacttgggcgcggcatggtgaatctggcagcatggccgtcttccaccaaacgcagggccccagctattcggagtccaaacggctggaattcgtggcagccagactgggcgcggagctgcggaatgcctcgctgaggatgttcgggttgcgcgtagaggatgaaggcaactacacctgcctgttcgtcacgttcccgcagggcagcaggagcgtggatatctggctccgagtgcttgccaagccccagaacacagctgaggttcagaaggtccagctcactggagagccagtgcccatggcccgctgcgtctccacagggggtcgcccgccagcccaaatcacctggcactcagacctgggcgggatgcccaatacgagccaggtgccagggttcctgtctggcacagtcactgtcaccagcctctggatattggtgccctcaagccaggtggacggcaagaatgtgacctgcaaggtggagcacgagagctttgagaagcctcagctgctgactgtgaacctcaccgtgtactaccccccagaggtatccatctctggctatgataacaactggtaccttggccagaatgaggccaccctgacctgcgatgctcgcagcaacccagagcccacaggctataattggagcacgaccatgggtcccctgccaccctttgctgtggcccagggcgcccagctcctgatccgtcctgtggacaaaccaatcaacacaactttaatctgcaacgtcaccaatgccctaggagctcgccaggcagaactgaccgtccaggtcaaagagggacctcccagtgagcactcaggcatgtcccgtaacgccatcatcttcctggttctgggaatcctggtttttctgatcctgctggggatcgggatttatttctattggtccaaatgttcccgtgaggtcctttggcactgtcatctgtgtccctcgagtacagagcatgccagcgcctcagctaatgggcatgtctcctattcagctgtgagcagagagaacagctcttcccaggatccacagacagagggcacaagg

SEQ ID NO: 70 - DNA, 1614 bp, Homo sapiens
  CD122/nectin-2
atggcccgggccgctgccctcctgccgtcgagatcgccgccgacgccgctgctgtggccgctgctgctgctgctgctcctggaaaccggagcccaggatgtgcgagttcaagtgctacccgaggtgcgaggccagctcgggggcaccgtggagctgccgtgccacctgctgccacctgttcctggactgtacatctccctggtgacctggcagcgcccagatgcacctgcgaaccaccagaatgtggccgccttccaccctaagatgggtcccagcttccccagcccgaagcctggcagcgagcggctgtccttcgtctctgccaagcagagcactgggcaagacacagaggcagagctccaggacgccacgctggccctccacgggctcacggtggaggacgagggcaactacacttgcgagtttgccaccttccccaaggggtccgtccgagggatgacctggctcagagtcatagccaagcccaagaaccaagctgaggcccagaaggtcacgttcagccaggaccctacgacagtggccctctgcatctccaaagagggccgcccacctgcccggatctcctggctctcatccctggactgggaagccaaagagactcaggtgtcagggaccctggccggaactgtcactgtcaccagccgcttcaccttggtgccctcgggccgagcagatggtgtcacggtcacctgcaaagtggagcatgagagcttcgaggaaccagccctgatacctgtgaccctctctgtacgctaccctcctgaagtgtccatctccggctatgatgacaactggtacctcggccgtactgatgccaccctgagctgtgacgtccgcagcaacccagagcccacgggctatgactggagcacgacctcaggcaccttcccgacctccgcagtggcccagggctcccagctggtcatccacgcagtggacagtctgttcaataccaccttcgtctgcacagtcaccaatgccgtgggcatgggccgcgctgagcaggtcatctttgtccgagagacccccaacacagcaggcgcaggggccacaggcggcatcatcgggggcatcatcgccgccatcattgctactgctgtggctgccacgggcatccttatctgccggcagcagcggaaggagcagacgctgcagggggcagaggaggacgaagacctggagggacctccctcctacaagccaccgaccccaaaagcgaagctggaggcacaggagatgccctcccagctcttcactctgggggcctcggagcacagcccactcaagaccccctactttgatgctggcgcctcatgcactgagcaggaaatgcctcgataccatgagctgcccaccttggaagaacggtcaggacccttgcaccctggagccacaagcctggggtcccccatcccggtgcctccagggccacctgctgtggaagacgtttccctggatctagaggatgaggagggggaggaggaggaagagtatctggacaagatcaaccccatctatgatgctctgtcctatagcagcccctctgattcctaccagggcaaaggctttgtcatgtcccgggccatgtatgtg

SEQ ID NO: 71 - DNA, 1008 bp, Homo sapiens
  CD226 antigen
atggattatcctactttacttttggctcttcttcatgtatacagagctctatgtgaagaggtgctttggcatacatcagttccctttgccgagaacatgtctctagaatgtgtgtatccatcaatgggcatcttaacacaggtggagtggttcaagatcgggacccagcaggattccatagccattttcagccctactcatggcatggtcataaggaagccctatgctgagagggtttactttttgaattcaacgatggcttccaataacatgactcttttctttcggaatgcctctgaagatgatgttggctactattcctgctctctttacacttacccacagggaacttggcagaaggtgatacaggtggttcagtcagatagttttgaggcagctgtgccatcaaatagccacattgtttcggaacctggaaagaatgtcacactcacttgtcagcctcagatgacgtggcctgtgcaggcagtgaggtgggaaaagatccagccccgtcagatcgacctcttaacttactgcaacttggtccatggcagaaatttcacctccaagttcccaagacaaatagtgagcaactgcagccacggaaggtggagcgtcatcgtcatccccgatgtcacagtctcagactcggggctttaccgctgctacttgcaggccagcgcaggagaaaacgaaaccttcgtgatgagattgactgtagccgagggtaaaaccgataaccaatataccctctttgtggctggagggacagttttattgttgttgtttgttatctcaattaccaccatcattgtcattttccttaacagaaggagaaggagagagagaagagatctatttacagagtcctgggatacacagaaggcacccaataactatagaagtcccatctctaccagtcaacctaccaatcaatccatggatgatacaagagaggatatttatgtcaactatccaaccttctctcgcagaccaaagactagagtt

SEQ ID NO: 72 - DNA, 545 bp, Homo sapiens
  CD160 antigen
ggatgctgttggaacccggcagaggctgctgtgccctggccatcctgctggcaattgtggacatccagtctggtggatgcattaacatcaccagctcagcttcccaggaaggaacgcgactaaacttaatctgtactgtatggcataagaaagaagaggctgaggggtttgtagtgtttttgtgcaaggacaggtctggagactgttctcctgagaccagtttaaaacagctgagacttaaaagggatcctgggatagatggtgttggtgaaatatcatctcagttgatgttcaccataagccaagtcacaccgttgcacagtgggacctaccagtgttgtgccagaagccagaagtcaggtatccgccttcagggccattttttctccattctattcacagagacagggaactacacagtgacgggattgaaacaaagacaacaccttgagttcagccataatgaaggcactctcagttcaggcttcctacaagaaaaggtctgggtaatgctggtcaccagccttgtggcccttcaagctttg

SEQ ID NO: 73 - DNA, 264 bp, Homo sapiens
  human U6 RNA Pol III promoter
aaggtcgggcaggaagagggcctatttcccatgattccttcatatttgcatatacgatacaaggctgttagagagataattagaattaatttgactgtaaacacaaagatattagtacaaaatacgtgacgtagaaagtaataatttcttgggtagtttgcagttttaaaattatgttttaaaatggactatcatatgcttaccgtaacttgaaagtatttcgatttcttggctttatatatcttgtggaaaggacgaaactag

SEQ ID NO: 74 - DNA, 99 bp, Homo sapiens
  human H1 RNA Pol III promoter
atatttgcatgtcgctatgtgttctgggaaatcaccataaacgtgaaatgtctttggatttgggaatcttataagttctgtatgagaccactccctagg

SEQ ID NO: 75 - DNA, 58 bp, Artificial Sequence
  shRNA-encoding sequence targeting muPD-L1
ccggccgaaatgatacacaattcgactcgagtcgaattgtgtatcatttcggtttttg

SEQ ID NO: 76 - DNA, 57 bp, Artificial Sequence
  shRNA-encoding sequence targeting muSIRPA
ccggccacaactggaatgtcttcatctcgagatgaagacattccagttgtggttttt

SEQ ID NO: 77 - DNA, 58 bp, Artificial Sequence
  shRNA-encoding sequence targeting muTREX1, clone 1
ccggacaaccaacctaaggccacatctcgagatgtggccttaggttggttgttttttg

SEQ ID NO: 78 - DNA, 58 bp, Artificial Sequence
  shRNA-encoding sequence targeting muTREX1, clone 2
ccggcctagatggtaccttctgtgtctcgagacacagaaggtaccatctaggtttttg

SEQ ID NO: 79 - DNA, 3966 bp, Artificial Sequence
  Vector1-human shTREX1-1_shPDL1-1
ctttcctgcgttatcccctgattctgtggataaccgtattaccgcctttgagtgagctgataccgctcgccgcagccgaacgaccgagcgcagcgagtcagtgagcgaggaagcggaagagcgcccaatacgcaaaccgcctctccccgcgcgttggccgattcattaatgcagctggcacgacaggtttcccgactggaaagcgggcagtgagcgcaacgcaattaatacgcgtaccgctagccaggaagagtttgtagaaacgcaaaaaggccatccgtcaggatggccttctgcttagtttgatgcctggcagtttatggcgggcgtcctgcccgccaccctccgggccgttgcttcacaacgttcaaatccgctcccggcggatttgtcctactcaggagagcgttcaccgacaaacaacagataaaacgaaaggcccagtcttccgactgagcctttcgttttatttgatgcctggcagttccctactctcgcgttaacgctagcatggatgttttcccagtcacgacgttgtaaaacgacggccagtcttaagctcgggcccttaaaggaaccaattcagtcgagaattggtaccatatttgcatgtcgctatgtgttctgggaaatcaccataaacgtgaaatgtctttggatttgggaatcttataagttctgtatgagaccactccctaggcagcgcatgggcgtcaattctagagattgacgcccatgcgctgcttttttcgacagatctggcgcgccatagtggccagcggccgcaggtaagccagcccaggcctcgccctccagctcaaggcgggacaggtgccctagagtagcctgcatccagggacaggccccagccgggtgctgacacgtccacctccatctcttcctcaggtctgcccgggtggcatccctgtgacccctccccagtgcctctcctggccctggaagttgccactccagtgcccaccagccttgtcctaataaaattaagttgcatcattttgtctgactaggtgtccttctataatattatggggtggaggggggtggtatggagcaaggggcccaagttaacttgtttattgcagcttataatggttacaaataaagcaatagcatcacaaatttcacaaataaagcatttttttcactgcattctagttgtggtttgtccaaactcatcaatgtatcttatcatgtctggatccaaggtcgggcaggaagagggcctatttcccatgattccttcatatttgcatatacgatacaaggctgttagagagataattagaattaatttgactgtaaacacaaagatattagtacaaaatacgtgacgtagaaagtaataatttcttgggtagtttgcagttttaaaattatgttttaaaatggactatcatatgcttaccgtaacttgaaagtatttcgatttcttggctttatatatcttgtggaaaggacgaaactaggtagagtatggtagcaatatctagagtattgctaccatactctacttttttcgagtagctagagaattcatggtaatagcgatgactaatacgtagatgtactgccaagtaggaaagtcccataaggtcatgtactgggcataatgccaggcgggccatttaccgtcattgacgtcaatagggggcgtacttggcatatgatacacttgatgtactgccaagtgggcagtttaccgtaaatagtccacccattgacgtcaatggaaagtccctattggcgttactatgggaacatacgtcattattgacgtcaatgggcgggggtcgttgggcggtcagccaggcgggccatttaccgtaagttatgtaacgcggaactccatatatgggctatgaactaatgaccccgtaattgattactattaataactagccatccagctgatatcccatggtcatagctgtttcctggcagctctggcccgtgtctcaaaatctctgatgttacattgcacaagataaaaatatatcatcatgaacaataaaactgtctgcttacataaacagtaatacaaggggtgttatgaaaaatgttggttttatcggctggcgcggaatggtcggctctgttctcatgcaacgcatggtagaggagcgcgatttcgacgctattcgccctgttttcttttctacctcccagtttggacaggcggcgcccaccttcggcgacacctccaccggcacgctacaggacgcttttgatctggatgcgctaaaagcgctcgatatcatcgtgacctgccagggcggcgattataccaacgaaatttatccaaagctgcgcgaaagcggatggcagggttactggattgatgcggcttctacgctgcgcatgaaagatgatgccattattattctcgacccggtcaaccaggacgtgattaccgacggcctgaacaatggcgtgaagacctttgtgggcggtaactgtaccgttagcctgatgttgatgtcgctgggcggtctctttgcccataatctcgttgactgggtatccgtcgcgacctatcaggccgcctccggcggcggcgcgcgccatatgcgcgagctgttaacccagatgggtcagttgtatggccatgtcgccgatgaactggcgacgccgtcttccgcaattcttgatattgaacgcaaagttacggcattgacccgcagcggcgagctgccggttgataactttggcgtaccgctggcgggaagcctgatcccctggatcgacaaacagctcgataacggccagagccgcgaagagtggaaaggccaggcggaaaccaacaagattctcaatactgcctctgtgattccggttgatggtttgtgtgtgcgcgtcggcgcgctgcgctgtcacagccaggcgttcaccatcaagctgaaaaaagaggtatccattccgacggtggaagaactgctggcggcacataatccgtgggcgaaagtggtgccgaacgatcgtgatatcactatgcgcgaattaaccccggcggcggtgaccggcacgttgactacgccggttggtcgtctgcgtaagctgaacatggggccagagttcttgtcggcgtttaccgtaggcgaccagttgttatggggcgccgccgagccgctgcgtcgaatgctgcgccagttggcgtagtcagaattggttaattggttgtaacactggcagagcattacgctgacttgacgggacggcgcaagctcatgaccaaaatcccttaacgtgagttacgcgtcgttccactgagcgtcagaccccgtagaaaagatcaaaggatcttcttgagatcctttttttctgcgcgtaatctgctgcttgcaaacaaaaaaaccaccgctaccagcggtggtttgtttgccggatcaagagctaccaactctttttccgaaggtaactggcttcagcagagcgcagataccaaatactgtccttctagtgtagccgtagttaggccaccacttcaagaactctgtagcaccgcctacatacctcgctctgctaatcctgttaccagtggctgctgccagtggcgataagtcgtgtcttaccgggttggactcaagacgatagttaccggataaggcgcagcggtcgggctgaacggggggttcgtgcacacagcccagcttggagcgaacgacctacaccgaactgagatacctacagcgtgagcattgagaaagcgccacgcttcccgaagggagaaaggcggacaggtatccggtaagcggcagggtcggaacaggagagcgcacgagggagcttccagggggaaacgcctggtatctttatagtcctgtcgggtttcgccacctctgacttgagcgtcgatttttgtgatgctcgtcaggggggcggagcctatggaaaaacgccagcaacgcggcctttttacggttcctggccttttgctggccttttgct

SEQ ID NO: 80 - DNA, 3972 bp, Artificial Sequence
  Vector2-mouse shTREX1-1_shPDL1-1
ctttcctgcgttatcccctgattctgtggataaccgtattaccgcctttgagtgagctgataccgctcgccgcagccgaacgaccgagcgcagcgagtcagtgagcgaggaagcggaagagcgcccaatacgcaaaccgcctctccccgcgcgttggccgattcattaatgcagctggcacgacaggtttcccgactggaaagcgggcagtgagcgcaacgcaattaatacgcgtaccgctagccaggaagagtttgtagaaacgcaaaaaggccatccgtcaggatggccttctgcttagtttgatgcctggcagtttatggcgggcgtcctgcccgccaccctccgggccgttgcttcacaacgttcaaatccgctcccggcggatttgtcctactcaggagagcgttcaccgacaaacaacagataaaacgaaaggcccagtcttccgactgagcctttcgttttatttgatgcctggcagttccctactctcgcgttaacgctagcatggatgttttcccagtcacgacgttgtaaaacgacggccagtcttaagctcgggcccttaaaggaaccaattcagtcgagaattggtaccatatttgcatgtcgctatgtgttctgggaaatcaccataaacgtgaaatgtctttggatttgggaatcttataagttctgtatgagaccactccctagacaaccaacctaaggccacatctcgagatgtggccttaggttggttgtttttttcgacagatctggcgcgccatagtggccagcggccgcaggtaagccagcccaggcctcgccctccagctcaaggcgggacaggtgccctagagtagcctgcatccagggacaggccccagccgggtgctgacacgtccacctccatctcttcctcaggtctgcccgggtggcatccctgtgacccctccccagtgcctctcctggccctggaagttgccactccagtgcccaccagccttgtcctaataaaattaagttgcatcattttgtctgactaggtgtccttctataatattatggggtggaggggggtggtatggagcaaggggcccaagttaacttgtttattgcagcttataatggttacaaataaagcaatagcatcacaaatttcacaaataaagcatttttttcactgcattctagttgtggtttgtccaaactcatcaatgtatcttatcatgtctggatccaaggtcgggcaggaagagggcctatttcccatgattccttcatatttgcatatacgatacaaggctgttagagagataattagaattaatttgactgtaaacacaaagatattagtacaaaatacgtgacgtagaaagtaataatttcttgggtagtttgcagttttaaaattatgttttaaaatggactatcatatgcttaccgtaacttgaaagtatttcgatttcttggctttatatatcttgtggaaaggacgaaactagccgaaatgatacacaattcgactcgagtcgaattgtgtatcatttcggttttttcgagtagctagagaattcatggtaatagcgatgactaatacgtagatgtactgccaagtaggaaagtcccataaggtcatgtactgggcataatgccaggcgggccatttaccgtcattgacgtcaatagggggcgtacttggcatatgatacacttgatgtactgccaagtgggcagtttaccgtaaatagtccacccattgacgtcaatggaaagtccctattggcgttactatgggaacatacgtcattattgacgtcaatgggcgggggtcgttgggcggtcagccaggcgggccatttaccgtaagttatgtaacgcggaactccatatatgggctatgaactaatgaccccgtaattgattactattaataactagccatccagctgatatcccatggtcatagctgtttcctggcagctctggcccgtgtctcaaaatctctgatgttacattgcacaagataaaaatatatcatcatgaacaataaaactgtctgcttacataaacagtaatacaaggggtgttatgaaaaatgttggttttatcggctggcgcggaatggtcggctctgttctcatgcaacgcatggtagaggagcgcgatttcgacgctattcgccctgttttcttttctacctcccagtttggacaggcggcgcccaccttcggcgacacctccaccggcacgctacaggacgcttttgatctggatgcgctaaaagcgctcgatatcatcgtgacctgccagggcggcgattataccaacgaaatttatccaaagctgcgcgaaagcggatggcagggttactggattgatgcggcttctacgctgcgcatgaaagatgatgccattattattctcgacccggtcaaccaggacgtgattaccgacggcctgaacaatggcgtgaagacctttgtgggcggtaactgtaccgttagcctgatgttgatgtcgctgggcggtctctttgcccataatctcgttgactgggtatccgtcgcgacctatcaggccgcctccggcggcggcgcgcgccatatgcgcgagctgttaacccagatgggtcagttgtatggccatgtcgccgatgaactggcgacgccgtcttccgcaattcttgatattgaacgcaaagttacggcattgacccgcagcggcgagctgccggttgataactttggcgtaccgctggcgggaagcctgatcccctggatcgacaaacagctcgataacggccagagccgcgaagagtggaaaggccaggcggaaaccaacaagattctcaatactgcctctgtgattccggttgatggtttgtgtgtgcgcgtcggcgcgctgcgctgtcacagccaggcgttcaccatcaagctgaaaaaagaggtatccattccgacggtggaagaactgctggcggcacataatccgtgggcgaaagtggtgccgaacgatcgtgatatcactatgcgcgaattaaccccggcggcggtgaccggcacgttgactacgccggttggtcgtctgcgtaagctgaacatggggccagagttcttgtcggcgtttaccgtaggcgaccagttgttatggggcgccgccgagccgctgcgtcgaatgctgcgccagttggcgtagtcagaattggttaattggttgtaacactggcagagcattacgctgacttgacgggacggcgcaagctcatgaccaaaatcccttaacgtgagttacgcgtcgttccactgagcgtcagaccccgtagaaaagatcaaaggatcttcttgagatcctttttttctgcgcgtaatctgctgcttgcaaacaaaaaaaccaccgctaccagcggtggtttgtttgccggatcaagagctaccaactctttttccgaaggtaactggcttcagcagagcgcagataccaaatactgtccttctagtgtagccgtagttaggccaccacttcaagaactctgtagcaccgcctacatacctcgctctgctaatcctgttaccagtggctgctgccagtggcgataagtcgtgtcttaccgggttggactcaagacgatagttaccggataaggcgcagcggtcgggctgaacggggggttcgtgcacacagcccagcttggagcgaacgacctacaccgaactgagatacctacagcgtgagcattgagaaagcgccacgcttcccgaagggagaaaggcggacaggtatccggtaagcggcagggtcggaacaggagagcgcacgagggagcttccagggggaaacgcctggtatctttatagtcctgtcgggtttcgccacctctgacttgagcgtcgatttttgtgatgctcgtcaggggggcggagcctatggaaaaacgccagcaacgcggcctttttacggttcctggccttttgctggccttttgct

SEQ ID NO: 81 - DNA, 1281 bp, Salmonella typhimurium
  aroA
atggaatccctgacgttacaacccatcgcgcgggtcgatggcgccattaatttacctggctccaaaagtgtttcaaaccgtgctttgctcctggcggctttagcttgtggtaaaaccgctctgacgaatctgctggatagcgatgacgtccgccatatgctcaatgccctgagcgcgttggggatcaattacaccctttctgccgatcgcacccgctgtgatatcacgggtaatggcggcgcattacgtgcgccaggcgctctggaactgtttctcggtaatgccggaaccgcgatgcgtccgttagcggcagcgctatgtctggggcaaaatgagatagtgttaaccggcgaaccgcgtatgaaagagcgtccgataggccatctggtcgattcgctgcgtcagggcggggcgaatattgattacctggagcaggaaaactatccgcccctgcgtctgcgcggcggttttaccggcggcgacattgaggttgatggtagcgtttccagccagttcctgaccgctctgctgatgacggcgccgctggcccctaaagacacaattattcgcgttaaaggcgaactggtatcaaaaccttacatcgatatcacgctaaatttaatgaaaacctttggcgtggagatagcgaaccaccactaccaacaatttgtcgtgaagggaggtcaacagtatcactctccaggtcgctatctggtcgagggcgatgcctcgtcagcgtcctattttctcgccgctggggcgataaaaggcggcacggtaaaagtgaccggaattggccgcaaaagtatgcagggcgatattcgttttgccgatgtgctggagaaaatgggcgcgaccattacctggggcgatgattttattgcctgcacgcgcggtgaattgcacgccatagatatggatatgaaccatattccggatgcggcgatgacgattgccaccacggcgctgtttgcgaaaggaaccacgacgttgcgcaatatttataactggcgagtgaaagaaaccgatcgcctgttcgcgatggcgaccgagctacgtaaagtgggcgctgaagtcgaagaagggcacgactatattcgtatcacgccgccggcgaagctccaacacgcggatattggcacgtacaacgaccaccgtatggcgatgtgcttctcactggtcgcactgtccgatacgccagttacgatcctggaccctaaatgtaccgcaaaaacgttccctgattatttcgaacaactggcgcgaatgagtacgcctgcc

SEQ ID NO: 82 - DNA, 1094 bp, Salmonella typhimurium
  aroC
acggagccgtgatggcaggaaacacaattggacaactctttcgcgtaaccactttcggcgaatcacacgggctggcgcttgggtgtatcgtcgatggcgtgccgcccggcatcccgttgacggaggccgatctgcaacacgatctcgacagacgccgccccggcacctcgcgctatactacccagcgccgcgaaccggaccaggtaaaaattctctccggcgtgtttgatggcgtgacgaccggcaccagcattggcctactgattgaaaacaccgatcagcgctcgcaggactacagcgcgattaaagatgtttttcgtccgggacacgcggattacacctatgagcagaaatacggcctgcgcgattaccgtggcggtggacgttcttccgcgcgtgaaaccgcgatgcgcgtagcggcaggggcgatcgccaagaaatacctggcggaaaagttcggcatcgaaatccgcggctgcctgacccagatgggcgacattccgctggagattaaagactggcgtcaggttgagcttaatccgttcttttgtcccgatgcggacaaacttgacgcgctggacgaactgatgcgcgcgctgaaaaaagagggtgactccatcggcgcgaaagtgacggtgatggcgagcggcgtgccggcagggcttggcgaaccggtatttgaccgactggatgcggacatcgcccatgcgctgatgagcattaatgcggtgaaaggcgtggagatcggcgaaggatttaacgtggtggcgctgcgcggcagccagaatcgcgatgaaatcacggcgcagggttttcagagcaaccacgctggcggcatcctcggtggcatcagtagcgggcaacacattgtggcgcatatggcgctgaaacctacctccagcattaccgtgccgggacgtacgatcaaccgggcaggtgaagaagtcgaaatgatcaccaaagggcgccacgatccgtgtgtggggattcgcgcagtgccgatcgcagaagccatgctggcgatcgtgctgatggatcacctgctgcgccatcgggcacagaatgcggatgtaaagacagagattccacgctgg

SEQ ID NO: 83 - DNA, 767 bp, Salmonella typhimurium
  aroD
aagggtaccaaatgaaaaccgtaactgtaagagatctcgtggttggcgaaggcgcgccaaagatcattgtgtcgctaatgggaaaaaccattaccgatgtgaaatcggaagcactcgcctaccgtgaagcggatttcgatattctggagtggcgcgttgaccattttgccaacgtgacaacggcggaaagcgtacttgaggccgccggcgccatccgggagattattaccgataaacccttgctatttaccttccgcagcgcgaaagaaggcggcgaacaggcgctaaccaccggacagtatatcgatctgaatcgtgcagcggttgacagcggtctggtcgatatgatcgatcttgagctttttaccggcgacgatgaggtgaaagccaccgtcggctatgctcatcaacacaatgttgcggtgatcatgtctaaccatgattttcataaaacgcccgcagcggaagagattgttcagcgtctgcgtaaaatgcaggaactgggcgctgatattccgaagatcgccgtcatgccacagactaaagccgatgtcctgaccttacttaccgccactgtagaaatgcaggagcgctatgcggatcgtccgattattaccatgtcgatgtcgaaaaccggggtaatatctcgtcttgccggcgaagtgttcggttctgcggcaacgtttggcgcggtgaaaaaagcatctgcgccgggacaaatatcggtagccgatctgcgtaccgtattaactatattgcaccaggcg

SEQ ID NO: 84 - DNA, 684 bp, Salmonella typhimurium
  PhoP
aagggagaagagatgatgcgcgtactggttgtagaggataatgcattattacgccaccacctgaaggttcagctccaggattcaggtcaccaggtcgatgccgcagaagatgccagggaagctgattactaccttaatgaacaccttccggatatcgctattgtcgatttaggtctgccggatgaagacggcctttccttaatacgccgctggcgcagcagtgatgtttcactgccggttctggtgttaaccgcgcgcgaaggctggcaggataaagtcgaggttctcagctccggggccgatgactacgtgacgaagccattccacatcgaagaggtaatggcgcgtatgcaggcgttaatgcgccgtaatagcggtctggcctcccaggtgatcaacatcccgccgttccaggtggatctctcacgccgggaattatccgtcaatgaagaggtcatcaaactcacggcgttcgaatacaccattatggaaacgcttatccgtaacaacggtaaagtggtcagcaaagattcgctgatgcttcagctgtatccggatgcggaactgcgggaaagtcataccattgatgttctcatggggcgtctgcggaaaaaaatacaggcccagtatccgcacgatgtcattaccaccgtacgcggacaaggatatctttttgaattgcgc

SEQ ID NO: 85 - DNA, 1461 bp, Salmonella typhimurium
  PhoQ
atgaataaatttgctcgccattttctgccgctgtcgctgcgggttcgttttttgctggcgacagccggcgtcgtgctggtgctttctttggcatatggcatagtggcgctggtcggctatagcgtaagttttgataaaaccacctttcgtttgctgcgcggcgaaagcaacctgttttataccctcgccaaatgggaaaataataaaatcagcgttgagctgcctgaaaatctggacatgcaaagcccgaccatgacgctgatttacgatgaaacgggcaaattattatggacgcagcgcaacattccctggctgattaaaagcattcaaccggaatggttaaaaacgaacggcttccatgaaattgaaaccaacgtagacgccaccagcacgctgttgagcgaagaccattccgcgcaggaaaaactcaaagaagtacgtgaagatgacgatgatgccgagatgacccactcggtagcggtaaatatttatcctgccacggcgcggatgccgcagttaaccatcgtggtggtcgataccattccgatagaactaaaacgctcctatatggtgtggagctggttcgtatacgtgctggccgccaatttactgttagtcattcctttactgtggatcgccgcctggtggagcttacgccctatcgaggcgctggcgcgggaagtccgcgagcttgaagatcatcaccgcgaaatgctcaatccggagacgacgcgtgagctgaccagccttgtgcgcaaccttaatcaactgctcaaaagcgagcgtgaacgttataacaaataccgcacgaccctgaccgacctgacgcacagtttaaaaacgccgctcgcggttttgcagagtacgttacgctctttacgcaacgaaaagatgagcgtcagcaaagctgaaccggtgatgctggaacagatcagccggatttcccagcagatcggctattatctgcatcgcgccagtatgcgcggtagcggcgtgttgttaagccgcgaactgcatcccgtcgcgccgttgttagataacctgatttctgcgctaaataaagtttatcagcgtaaaggggtgaatatcagtatggatatttcaccagaaatcagttttgtcggcgagcaaaacgactttgtcgaagtgatgggcaacgtactggacaacgcttgtaaatattgtctggagtttgtcgagatttcggctcgccagaccgacgatcatttgcatattttcgtcgaagatgacggcccaggcattccccacagcaaacgttccctggtgtttgatcgcggtcagcgcgccgataccctacgaccaggacaaggcgtggggctggctgtcgcgcgcgagattacggaacaatacgccgggcagatcattgccagcgacagtctgctcggtggcgcccgtatggaggtcgtttttggccgacagcatcccacacagaaagaggaa

SEQ ID NO: 86 - DNA, 2731 bp, Salmonella typhimurium
  Adenylate cyclase (cyaA)
tctttctttacggtcaatgagcaaggtgttaaattgatcacgttttagaccattttttcgtcggtattagataaaaatatgcaggcgagaaagggtaacggttatttttgacatacggtttatcccgaatggcgacggtcaagtactgacctgcaccatgacgggtagcaacatcaggcgatacgtcttgtacctctatattgagactctgaaacagagactggatgccataaatcaactgcgtgtggatcgcgcgcttgctgccatgggacccgcttttcagcaggtttacagtcttctgccgacattattgcactatcaccatccactgatgccgggttaccttgatggtaacgttcccagcggtatttgcttctacacgcctgatgaaacccaacgccactatctgaacgaacttgagctgtaccgcggtatgacgccgcaggacccgccgaagggcgagctgccgattaccggcgtttacaccatgggcagcacctcctcggtcgggcagagctgctcgtccgacctggatatctgggtgtgccatcagtcctggctcgacggcgaagagcgtcagttgctgcaacgtaagtgtagcctgctggaaagctgggccgcctcgcttggcgttgaggtgagcttcttcctgatcgacgagaaccgtttccgccataacgaaagcggcagtctgggcggggaagactgtggttctacgcagcatatcctgttgcttgatgagttttatcgtaccgctgtgcgcctggccgggaagcgtatcctgtggagtatggtgccgtgcgacgaagaagagcattacgacgactatgtcatgacgctctatgcgcagggcgtattaacgccaaacgaatggctggatctggggggcttaagctcgctctccgccgaagagtactttggcgccagcctgtggcagctatacaagagcattgactcgccgtacaaagcggtgctgaaaacgctgctgctggaagcctattcatgggaatatcctaacccacgtctgctggcgaaagatattaaacaacgtctgcatgacggtgaaatcgtatcgtttggactcgatccctactgcatgatgctggaacgggtcactgaatacctgacggcgattgaagatccgacgcggctggatttagtccgccgctgcttttacctgaaagtgtgcgagaaattaagtcgcgagcgtgcctgcgtaggctggcgtcgggaagtattaagccagttagtcagcgagtggggatgggacgacgcgcgtctgaccatgctcgataatcgcgcaaactggaaaatcgatcaggtgcgcgaagcccacaacgaattgctcgacgccatgatgcaaagctatcgtaatctgattcgctttgcgcggcgcaacaacctcagcgtgagtgccagcccgcaggatatcggcgtactgacgcgtaagctgtacgcggcttttgaagcgttgccgggtaaagtcacgctggtgaacccgcagatatcgccggatctgtccgagccgaatttaacctttatccatgtgccgccgggacgcgccaaccgttcaggctggtatctctacaaccgcgcgccgaacatggattccatcatcagccatcagccgctggaatataaccgttatcttaataagctggtcgcgtgggcgtggttcaacggcctgctgacgtcgcgaacgcatctgtttattaagggcaacggtattgtcgacctgcctaagttacaggagatggtcgccgatgtttcgcaccatttcccgctgcgcttgcctgctccgacgccgaaagcgctctacagcccctgtgaaattcgccatctggcgattatcgttaacctcgaatatgacccgacggcggcgtttcgcaataaagtggtccattttgacttccgtaagctggacgttttcagctttggcgaagagcaaaactgtctgataggcagtatcgacttgttatatcgcaactcgtggaacgaagtgcgtactctgcactttaacggcgagcaggcgatgatcgaagcgctgaaaacgattctggggaaaatgcaccaggatgccgcgccgccggatagcgtggaggtgttctgctacagtcagcatcttcgcggcctgattcgcacccgtgtgcagcaactggtctccgaatgtattgagctacgtctttccagcacccgtcaggagaccggtcgcttcaaggcgctgcgggtttccgggcagacgtgggggctattcttcgaacgcttgaatgtctcggtgcagaagctggagaacgctatcgaattctacggcgcgatttcgcataacaagctgcacgggctgtcggtacaggtggaaaccaaccaggtgaaattgccgtcagtggtggatggcttcgccagcgaagggattatccagttcttctttgaagaaacaggcgatgagaaaggctttaacatttatattctggatgaaagtaaccgggcggaagtatatcaccactgcgaaggtagcaaggaagaactggtgcgcgacgtcagtcgcttctattcgtcatcgcacgatcgcttcacgtatggctccagttttatcaactttaacctgccgcagttctaccagatagtgaaaaccgatggccgcgcgcaggtgatcccattccgtacgcagcctatcaacaccgtgccgccagcaaaccaggatcatgacgcgccgctattgcagcagtatttttcg

SEQ ID NO: 87 - DNA, 826 bp, Salmonella typhimurium
  cAMP-activated global transcriptional regulator (crp)
aagctatgctaaaacagacaagatgctacagtaatacattgacgtactgcatgtatgcagaggacatcacattacaggctacaatctattttcgtagcccccttcccaggtagcgggaagtatatttttgcaaccccagagacagtgccgttttctggctctggagacagcttataacagaggataaccgcgcatggtgcttggcaaaccgcaaacagacccgactcttgaatggttcttgtctcattgccacattcataagtacccgtcaaagagcacgctgattcaccagggtgaaaaagcagaaacgctgtactacatcgttaaaggctccgtggcagtgctgatcaaagatgaagaagggaaagaaatgatcctttcttatctgaatcagggtgattttattggtgaactgggcctgtttgaagaaggccaggaacgcagcgcctgggtacgtgcgaaaaccgcatgtgaggtcgctgaaatttcctacaaaaaatttcgccaattaatccaggtcaacccggatattctgatgcgcctctcttcccagatggctcgtcgcttacaagtcacctctgaaaaagtaggtaacctcgccttccttgacgtcaccgggcgtatcgctcagacgctgctgaatctggcgaaacagcccgatgccatgacgcacccggatgggatgcagatcaaaatcactcgtcaggaaatcggccagatcgtcggctgctcccgcgaaaccgttggtcgtattttgaaaatgctggaagatcaaaacctgatctccgcgcatggcaagaccatcgtcgtctacggcacccgttaa

SEQ ID NO: 88 - DNA, 1566 bp, Homo sapiens
  cyclic GMP-AMP (cGAMP) synthase (cGAS), isoform 1
atgcagccttggcacggaaaggccatgcagagagcttccgaggccggagccactgcccccaaggcttccgcacggaatgccaggggcgccccgatggatcccaccgagtctccggctgcccccgaggccgccctgcctaaggcgggaaagttcggccccgccaggaagtcgggatcccggcagaaaaagagcgccccggacacccaggagaggccgcccgtccgcgcaactggggcccgcgccaaaaaggcccctcagcgcgcccaggacacgcagccgtctgacgccaccagcgcccctggggcagaggggctggagcctcctgcggctcgggagccggctctttccagggctggttcttgccgccagaggggcgcgcgctgctccacgaagccaagacctccgcccgggccctgggacgtgcccagccccggcctgccggtctcggcccccattctcgtacggagggatgcggcgcctggggcctcgaagctccgggcggttttggagaagttgaagctcagccgcgatgatatctccacggcggcggggatggtgaaaggggttgtggaccacctgctgctcagactgaagtgcgactccgcgttcagaggcgtcgggctgctgaacaccgggagctactatgagcacgtgaagatttctgcacctaatgaatttgatgtcatgtttaaactggaagtccccagaattcaactagaagaatattccaacactcgtgcatattactttgtgaaatttaaaagaaatccgaaagaaaatcctctgagtcagtttttagaaggtgaaatattatcagcttctaagatgctgtcaaagtttaggaaaatcattaaggaagaaattaacgacattaaagatacagatgtcatcatgaagaggaaaagaggagggagccctgctgtaacacttcttattagtgaaaaaatatctgtggatataaccctggctttggaatcaaaaagtagctggcctgctagcacccaagaaggcctgcgcattcaaaactggctttcagcaaaagttaggaagcaactacgactaaagccattttaccttgtacccaagcatgcaaaggaaggaaatggtttccaagaagaaacatggcggctatccttctctcacatcgaaaaggaaattttgaacaatcatggaaaatctaaaacgtgctgtgaaaacaaagaagagaaatgttgcaggaaagattgtttaaaactaatgaaataccttttagaacagctgaaagaaaggtttaaagacaaaaaacatctggataaattctcttcttatcatgtgaaaactgccttctttcacgtatgtacccagaaccctcaagacagtcagtgggaccgcaaagacctgggcctctgctttgataactgcgtgacatactttcttcagtgcctcaggacagaaaaacttgagaattattttattcctgaattcaatctattctctagcaacttaattgacaaaagaagtaaagaatttctgacaaagcaaattgaatatgaaagaaacaatgagtttccagtttttgatgaattt

SEQ ID NO: 89 - DNA, 1137 bp, Homo sapiens
  Stimulator of Interferon Genes (STING)(H232 Allele)
atgccccactccagcctgcatccatccatcccgtgtcccaggggtcacggggcccagaaggcagccttggttctgctgagtgcctgcctggtgaccctttgggggctaggagagccaccagagcacactctccggtacctggtgctccacctagcctccctgcagctgggactgctgttaaacggggtctgcagcctggctgaggagctgcgccacatccactccaggtaccggggcagctactggaggactgtgcgggcctgcctgggctgccccctccgccgtggggccctgttgctgctgtccatctatttctactactccctcccaaatgcggtcggcccgcccttcacttggatgcttgccctcctgggcctctcgcaggcactgaacatcctcctgggcctcaagggcctggccccagctgagatctctgcagtgtgtgaaaaagggaatttcaacgtggcccatgggctggcatggtcatattacatcggatatctgcggctgatcctgccagagctccaggcccggattcgaacttacaatcagcattacaacaacctgctacggggtgcagtgagccagcggctgtatattctcctcccattggactgtggggtgcctgataacctgagtatggctgaccccaacattcgcttcctggataaactgccccagcagaccggtgaccatgctggcatcaaggatcgggtttacagcaacagcatctatgagcttctggagaacgggcagcgggcgggcacctgtgtcctggagtacgccacccccttgcagactttgtttgccatgtcacaatacagtcaagctggctttagccgggaggataggcttgagcaggccaaactcttctgccggacacttgaggacatcctggcagatgcccctgagtctcagaacaactgccgcctcattgcctaccaggaacctgcagatgacagcagcttctcgctgtcccaggaggttctccggcacctgcggcaggaggaaaaggaagaggttactgtgggcagcttgaagacctcagcggtgcccagtacctccacgatgtcccaagagcctgagctcctcatcagtggaatggaaaagcccctccctctccgcacggatttctct

SEQ ID NO: 90 - DNA, 972 bp, Salmonella typhimurium
  lipid A biosynthesis myristoyltransferase (msbB)
ttatttgatgggataaagatctttacgcttatacggctgaatctcgcctggcttgcgggttttgagcagcttcaggatccaggtgtactgttccggatgcgggccgacaaaaatttcgacctcttcgttcatccgtctggcgatagtgtggtcgtcagccgtgagcagatcgtccattggcgggcgaatctggatagtcaggcgatgcgttttaccattatacaccgggaaaagcggtatcacgcgtgcgcggcacactttcatcagccgaccaattgcaggcagcgtcgctttgtatgtcgcaaagaaatcaacgaattcactatgctccgggccgtgatcctggtccggcaggtagtaaccccagtagccctgacgaacagactgaataaagggtttaatcccgtcattacgcgcatgcaaacgtccgccgaaacgccgacgcactgtgttccagatatagtcaaaaaccggattaccctgattatgaaacatcgccgccattttttgcccctgagaggccatcagcatggctggaatgtcgacgccccagccatgcggtacgagaaaaatgactttttcgtcgttacgacgcatctcctcgataatctccagaccttcccagtcaacacgctgttgaatttttttcggaccgcgcatcgccaactcagccatcatcgccattgcctgtggcgcggtggcgaacatctcatcgacaatcgcttcgcgctcagcttcgctacgctgcggaaagcacaacgacagattaattagcgcccggcgacgagaactcttccccagccgtccggcaaaacgccccagcgtcgccagcaaagggtcgcggaatgatgccggtgttaatgcgatccccgccattgccgccgcgcccaaccaggcgccccaatactgtggatagcgaaaggatttttcgaattcagggatatactcactattattttttttggtttccat

SEQ ID NO: 91 - DNA, 1038 bp, Salmonella typhimurium
  Phosphoribosylaminoimidazole synthetase (purI)
ttattcaataaccacacgctgttcggaatcagaggctttgatgataccgattttccatgcgttttcacctttctcgtttagcagagcaagcgctttgtccgcttccggagcggagagcgcaatcaccatgccgacgccgcagttaaaggtacggtacatttcatgtcggctgacattaccggcggtttgcagccaggtaaagatggcgggccactgccaggacgactcattaattaccgcctgggtattctccggcagaacgcgcggaatattttcccaaaagcccccgccggtgaggtgggcgatagcgtgtacatcgacgttttcaatcagttccagaaccgattttacgtagatacgggtcggttcaagcagatgatcggccagcggcttcccttccagcagagtggtttgtgggtcgcagccgctaacgtcaataattttccgcaccagcgaatatccattcgagtgcgggccgctggagccgagtgcaatcagcacgtcgccttcggcaacccgggagccgtcgatgatttctgatttttcgactacgccgacgcagaaacccgccacatcgtaatcttcgccgtgatacatgcccggcatttccgccgtctcgccgccgaccagcgcgcagccggattgcaggcagccttcggcaataccgttgatcacgctggcggcggtatcgacatccagtttacccgtggcatagtaatcgaggaaaaacagcggttccgcgccctgaacgaccagatcgtttacgcacattgccaccagatcaataccgatagcgtcgtgacgctttaagtccatcgccaggcgaagtttggtacctacgccgtcagtgccggaaaccagtaccggttcacgatatttttgcggcaacgcgcacagcgcaccgaaaccgcccagaccgcccataacctccgggcggcgagttttcttcactacgcctttgattcgatcaaccagagcgttacccgcatcaatatcgacgccggcatctttatagctaagagaggtcttatcggtcac

SEQ ID NO: 92 - DNA, 426 bp, Homo sapiens
  Survivin (SVN)/BIRC5, isoform 1
atgggtgccccgacgttgccccctgcctggcagccctttctcaaggaccaccgcatctctacattcaagaactggcccttcttggagggctgcgcctgcaccccggagcggatggccgaggctggcttcatccactgccccactgagaacgagccagacttggcccagtgtttcttctgcttcaaggagctggaaggctgggagccagatgacgaccccatagaggaacataaaaagcattcgtccggttgcgctttcctttctgtcaagaagcagtttgaagaattaacccttggtgaatttttgaaactggacagagaaagagccaagaacaaaattgcaaaggaaaccaacaataagaagaaagaatttgaggaaactgcggagaaagtgcgccgtgccatcgagcagctggctgccatggat

SEQ ID NO: 93 - DNA, 285 bp, E. coli
  araBAD promoter (pBAD)
aagaaaccaattgtccatattgcatcagacattgccgtcactgcgtcttttactggctcttctcgctaaccaaaccggtaaccccgcttattaaaagcattctgtaacaaagcgggaccaaagccatgacaaaaacgcgtaacaaaagtgtctataatcacggcagaaaagtccacattgattatttgcacggcgtcacactttgctatgccatagcatttttatccataagattagcggatcttacctgacgctttttatcgcaactctctactgtttctccat

SEQ ID NO: 94 - DNA, 459 bp, Homo sapiens
  Interleukin 2 (IL-2)
atgtacaggatgcaactcctgtcttgcattgcactaagtcttgcacttgtcacaaacagtgcacctacttcaagttctacaaagaaaacacagctacaactggagcatttactgctggatttacagatgattttgaatggaattaataattacaagaatcccaaactcaccaggatgctcacatttaagttttacatgcccaagaaggccacagaactgaaacatcttcagtgtctagaagaagaactcaaacctctggaggaagtgctaaatttagctcaaagcaaaaactttcacttaagacccagggacttaatcagcaatatcaacgtaatagttctggaactaaagggatctgaaacaacattcatgtgtgaatatgctgatgagacagcaaccattgtagaatttctgaacagatggattaccttttgtcaaagcatcatctcaacactgact

SEQ ID NO: 95 - DNA, 567 bp, Homo sapiens
  Interferon (IFN) alpha
atggcctcgccctttgctttactgatggtcctggtggtgctcagctgcaagtcaagctgctctctgggctgtgatctccctgagacccacagcctggataacaggaggaccttgatgctcctggcacaaatgagcagaatctctccttcctcctgtctgatggacagacatgactttggatttccccaggaggagtttgatggcaaccagttccagaaggctccagccatctctgtcctccatgagctgatccagcagatcttcaacctctttaccacaaaagattcatctgctgcttgggatgaggacctcctagacaaattctgcaccgaactctaccagcagctgaatgacttggaagcctgtgtgatgcaggaggagagggtgggagaaactcccctgatgaatgcggactccatcttggctgtgaagaaatacttccgaagaatcactctctatctgacagagaagaaatacagcccttgtgcctgggaggttgtcagagcagaaatcatgagatccctctctttatcaacaaacttgcaagaaagattaaggaggaaggaa

SEQ ID NO: 96 - DNA, 729 bp, Homo sapiens
  CD48, isoform 1
atgtgctccagaggttgggattcgtgtctggctctggaattgctactgctgcctctgtcactcctggtgaccagcattcaaggtcacttggtacatatgaccgtggtctccggcagcaacgtgactctgaacatctctgagagcctgcctgagaactacaaacaactaacctggttttatactttcgaccagaagattgtagaatgggattccagaaaatctaagtactttgaatccaaatttaaaggcagggtcagacttgatcctcagagtggcgcactgtacatctctaaggtccagaaagaggacaacagcacctacatcatgagggtgttgaaaaagactgggaatgagcaagaatggaagatcaagctgcaagtgcttgaccctgtacccaagcctgtcatcaaaattgagaagatagaagacatggatgacaactgttatctgaaactgtcatgtgtgatacctggcgagtctgtaaactacacctggtatggggacaaaaggcccttcccaaaggagctccagaacagtgtgcttgaaaccacccttatgccacataattactccaggtgttatacttgccaagtcagcaattctgtgagcagcaagaatggcacggtctgcctcagtccaccctgtaccctggcccggtcctttggagtagaatggattgcaagttggctagtggtcacggtgcccaccattcttggcctgttacttacc

SEQ ID NO: 97 - DNA, 1602 bp, Homo sapiens
  CD276/B7-H3, isoform 1
atgctgcgtcggcggggcagccctggcatgggtgtgcatgtgggtgcagccctgggagcactgtggttctgcctcacaggagccctggaggtccaggtccctgaagacccagtggtggcactggtgggcaccgatgccaccctgtgctgctccttctcccctgagcctggcttcagcctggcacagctcaacctcatctggcagctgacagataccaaacagctggtgcacagctttgctgagggccaggaccagggcagcgcctatgccaaccgcacggccctcttcccggacctgctggcacagggcaacgcatccctgaggctgcagcgcgtgcgtgtggcggacgagggcagcttcacctgcttcgtgagcatccgggatttcggcagcgctgccgtcagcctgcaggtggccgctccctactcgaagcccagcatgaccctggagcccaacaaggacctgcggccaggggacacggtgaccatcacgtgctccagctaccagggctaccctgaggctgaggtgttctggcaggatgggcagggtgtgcccctgactggcaacgtgaccacgtcgcagatggccaacgagcagggcttgtttgatgtgcacagcatcctgcgggtggtgctgggtgcaaatggcacctacagctgcctggtgcgcaaccccgtgctgcagcaggatgcgcacagctctgtcaccatcacaccccagagaagccccacaggagccgtggaggtccaggtccctgaggacccggtggtggccctagtgggcaccgatgccaccctgcgctgctccttctcccccgagcctggcttcagcctggcacagctcaacctcatctggcagctgacagacaccaaacagctggtgcacagtttcaccgaaggccgggaccagggcagcgcctatgccaaccgcacggccctcttcccggacctgctggcacaaggcaatgcatccctgaggctgcagcgcgtgcgtgtggcggacgagggcagcttcacctgcttcgtgagcatccgggatttcggcagcgctgccgtcagcctgcaggtggccgctccctactcgaagcccagcatgaccctggagcccaacaaggacctgcggccaggggacacggtgaccatcacgtgctccagctaccggggctaccctgaggctgaggtgttctggcaggatgggcagggtgtgcccctgactggcaacgtgaccacgtcgcagatggccaacgagcagggcttgtttgatgtgcacagcgtcctgcgggtggtgctgggtgcgaatggcacctacagctgcctggtgcgcaaccccgtgctgcagcaggatgcgcacggctctgtcaccatcacagggcagcctatgacattccccccagaggccctgtgggtgaccgtggggctgtctgtctgtctcattgcactgctggtggccctggctttcgtgtgctggagaaagatcaaacagagctgtgaggaggagaatgcaggagctgaggaccaggatggggagggagaaggctccaagacagccctgcagcctctgaaacactctgacagcaaagaagatgatggacaagaaatagcc

SEQ ID NO: 98 - DNA, 846 bp, Homo sapiens
  B7-H4/VTCN1
atggcttccctggggcagatcctcttctggagcataattagcatcatcattattctggctggagcaattgcactcatcattggctttggtatttcagggagacactccatcacagtcactactgtcgcctcagctgggaacattggggaggatggaatcctgagctgcacttttgaacctgacatcaaactttctgatatcgtgatacaatggctgaaggaaggtgttttaggcttggtccatgagttcaaagaaggcaaagatgagctgtcggagcaggatgaaatgttcagaggccggacagcagtgtttgctgatcaagtgatagttggcaatgcctctttgcggctgaaaaacgtgcaactcacagatgctggcacctacaaatgttatatcatcacttctaaaggcaaggggaatgctaaccttgagtataaaactggagccttcagcatgccggaagtgaatgtggactataatgccagctcagagaccttgcggtgtgaggctccccgatggttcccccagcccacagtggtctgggcatcccaagttgaccagggagccaacttctcggaagtctccaataccagctttgagctgaactctgagaatgtgaccatgaaggttgtgtctgtgctctacaatgttacgatcaacaacacatactcctgtatgattgaaaatgacattgccaaagcaacaggggatatcaaagtgacagaatcggagatcaaaaggcggagtcacctacagctgctaaactcaaaggcttctctgtgtgtctcttctttctttgccatcagctgggcacttctgcctctcagcccttacctgatgctaaaa

SEQ ID NO: 99 - DNA, 867 bp, Homo sapiens
  BTLA/CD272, isoform 1
atgaagacattgcctgccatgcttggaactgggaaattattttgggtcttcttcttaatcccatatctggacatctggaacatccatgggaaagaatcatgtgatgtacagctttatataaagagacaatctgaacactccatcttagcaggagatccctttgaactagaatgccctgtgaaatactgtgctaacaggcctcatgtgacttggtgcaagctcaatggaacaacatgtgtaaaacttgaagatagacaaacaagttggaaggaagagaagaacatttcatttttcattctacattttgaaccagtgcttcctaatgacaatgggtcataccgctgttctgcaaattttcagtctaatctcattgaaagccactcaacaactctttatgtgacagatgtaaaaagtgcctcagaacgaccctccaaggacgaaatggcaagcagaccctggctcctgtatagtttacttcctttggggggattgcctctactcatcactacctgtttctgcctgttctgctgcctgagaaggcaccaaggaaagcaaaatgaactctctgacacagcaggaagggaaattaacctggttgatgctcaccttaagagtgagcaaacagaagcaagcaccaggcaaaattcccaagtactgctatcagaaactggaatttatgataatgaccctgacctttgtttcaggatgcaggaagggtctgaagtttattctaatccatgcctggaagaaaacaaaccaggcattgtttatgcttccctgaaccattctgtcattggaccgaactcaagactggcaagaaatgtaaaagaagcaccaacagaatatgcatccatatgtgtgaggagt

SEQ ID NO: 100 - DNA, 276 bp, Homo sapiens
  Chemokine (C-C motif) ligand 4 (CCL4)
atgaagctctgcgtgactgtcctgtctctcctcatgctagtagctgccttctgctctccagcgctctcagcaccaatgggctcagaccctcccaccgcctgctgcttttcttacaccgcgaggaagcttcctcgcaactttgtggtagattactatgagaccagcagcctctgctcccagccagctgtggtattccaaaccaaaagaagcaagcaagtctgtgctgatcccagtgaatcctgggtccaggagtacgtgtatgacctggaactgaac

SEQ ID NO: 101 - DNA, 3537 bp, Homo sapiens
  CD103/ITGAE
atgtggctcttccacactctgctctgcatagccagcctggccctgctggccgctttcaatgtggatgtggcccggccctggctcacgcccaagggaggtgcccctttcgtgctcagctcccttctgcaccaagaccccagcaccaaccagacctggctcctggtcaccagccccagaaccaagaggacaccagggcccctccatcgatgttcccttgtccaggatgaaatcctttgccatcctgtagagcatgtccccatccccaaggggaggcaccggggagtgaccgttgtccggagccaccacggtgttttgatatgcattcaagtgctggtccggcggcctcacagcctcagctcagaactcacaggcacctgtagcctcctgggccctgacctccgtccccaggctcaggccaacttcttcgaccttgaaaatctcctggatccagatgcacgtgtggacactggagactgctacagcaacaaagaaggcggtggagaagacgatgtgaacacagccaggcagcgccgggctctggagaaggaggaggaggaagacaaggaggaggaggaagacgaggaggaggaggaagctggcaccgagattgccatcatcctggatggctcaggaagcattgatcccccagactttcagagagccaaagacttcatctccaacatgatgaggaacttctatgaaaagtgttttgagtgcaactttgccttggtgcagtatggaggagtgatccagactgagtttgaccttcgggacagccaggatgtgatggcctccctcgccagagtccagaacatcactcaagtggggagtgtcaccaagactgcctcagccatgcaacacgtcttagacagcatcttcacctcaagccacggctccaggagaaaggcatccaaggtcatggtggtgctcaccgatggtggcatattcgaggaccccctcaaccttacgacagtcatcaactcccccaaaatgcagggtgttgagcgctttgccattggggtgggagaagaatttaagagtgctaggactgcgagggaactgaacctgatcgcctcagacccggatgagacccatgctttcaaggtgaccaactacatggcgctggatgggctgctgagcaaactgcggtacaacatcatcagcatggaaggcacggttggagacgcccttcactaccagctggcacagattggcttcagtgctcagatcctggatgagcggcaggtgctgctcggcgccgtcggggcctttgactggtccggaggggcgttgctctacgacacacgcagccgccggggccgcttcctgaaccagacagcggcggcggcggcagacgcggaggctgcgcagtacagctacctgggttacgctgtggccgtgctgcacaagacctgcagcctctcctacatcgcgggggctccacggtacaaacatcatggggccgtgtttgagctccagaaggagggcagagaggccagcttcctgccagtgctggagggagagcagatggggtcctattttggctctgagctgtgccctgtggacattgacatggatggaagcacggacttcttgctggtggctgctccattttaccacgttcatggagaagaaggcagagtctacgtgtaccgtctcagcgagcaggatggttctttctccttggcacgcatactgagtgggcaccccgggttcaccaatgcccgctttggctttgccatggcggctatgggggatctcagtcaggataagctcacagatgtggccatcggggcccccctggaaggttttggggcagatgatggtgccagcttcggcagtgtgtatatctacaatggacactgggacggcctctccgccagcccctcgcagcggatcagagcctccacggtggccccaggactccagtacttcggcatgtccatggctggtggctttgatattagtggcgacggccttgccgacatcaccgtgggcactctgggccaggcggttgtgttccgctcccggcctgtggttcgcctgaaggtctccatggccttcacccccagcgcactgcccatcggcttcaacggcgtcgtgaatgtccgtttatgttttgaaatcagctctgtaaccacagcctctgagtcaggcctccgcgaggcacttctcaacttcacgctggatgtggatgtggggaagcagaggagacggctgcagtgttcagacgtaagaagctgtctgggctgcctgagggagtggagcagcggatcccagctttgtgaggacctcctgctcatgcccacagagggagagctctgtgaggaggactgcttctccaatgccagtgtcaaagtcagctaccagctccagacccctgagggacagacggaccatccccagcccatcctggaccgctacactgagccctttgccatcttccagctgccctatgagaaggcctgcaagaataagctgttttgtgtcgcagaattacagttggccaccaccgtctctcagcaggagttggtggtgggtctcacaaaggagctgaccctgaacattaacctaactaactccggggaagattcctacatgacaagcatggccttgaattaccccagaaacctgcagttgaagaggatgcaaaagcctccctctccaaacattcagtgtgatgaccctcagccggttgcttctgtcctgatcatgaactgcaggattggtcaccccgtcctcaagaggtcatctgctcatgtttcagtcgtttggcagctagaggagaatgcctttccaaacaggacagcagacatcactgtgactgtcaccaattccaatgaaagacggtctttggccaacgagacccacacccttcaattcaggcatggcttcgttgcagttctgtccaaaccatccataatgtacgtgaacacaggccaggggctttctcaccacaaagaattcctcttccatgtacatggggagaacctctttggagcagaataccagttgcaaatttgcgtcccaaccaaattacgaggtctccaggttgtagcagtgaagaagctgacgaggactcaggcctccacggtgtgcacctggagtcaggagcgcgcttgtgcgtacagttcggttcagcatgtggaagaatggcattcagtgagctgtgtcatcgcttcagataaagaaaatgtcaccgtggctgcagagatctcctgggatcactctgaggagttactaaaagatgtaactgaactgcagatccttggtgaaatatctttcaacaaatctctatatgagggactgaatgcagagaaccacagaactaagatcactgtcgtcttcctgaaagatgagaagtaccattctttgcctatcatcattaaaggcagcgttggtggacttctggtgttgatcgtgattctggtcatcctgttcaagtgtggcttttttaaaagaaaatatcaacaactgaacttggagagcatcaggaaggcccagctgaaatcagagaatctgctcgaagaagagaat

SEQ ID NO: 102 - DNA, 1671 bp, Homo sapiens
  CD19, isoform 1
atgccacctcctcgcctcctcttcttcctcctcttcctcacccccatggaagtcaggcccgaggaacctctagtggtgaaggtggaagagggagataacgctgtgctgcagtgcctcaaggggacctcagatggccccactcagcagctgacctggtctcgggagtccccgcttaaacccttcttaaaactcagcctggggctgccaggcctgggaatccacatgaggcccctggccatctggcttttcatcttcaacgtctctcaacagatggggggcttctacctgtgccagccggggcccccctctgagaaggcctggcagcctggctggacagtcaatgtggagggcagcggggagctgttccggtggaatgtttcggacctaggtggcctgggctgtggcctgaagaacaggtcctcagagggccccagctccccttccgggaagctcatgagccccaagctgtatgtgtgggccaaagaccgccctgagatctgggagggagagcctccgtgtctcccaccgagggacagcctgaaccagagcctcagccaggacctcaccatggcccctggctccacactctggctgtcctgtggggtaccccctgactctgtgtccaggggccccctctcctggacccatgtgcaccccaaggggcctaagtcattgctgagcctagagctgaaggacgatcgcccggccagagatatgtgggtaatggagacgggtctgttgttgccccgggccacagctcaagacgctggaaagtattattgtcaccgtggcaacctgaccatgtcattccacctggagatcactgctcggccagtactatggcactggctgctgaggactggtggctggaaggtctcagctgtgactttggcttatctgatcttctgcctgtgttcccttgtgggcattcttcatcttcaaagagccctggtcctgaggaggaaaagaaagcgaatgactgaccccaccaggagattcttcaaagtgacgcctcccccaggaagcgggccccagaaccagtacgggaacgtgctgtctctccccacacccacctcaggcctcggacgcgcccagcgttgggccgcaggcctggggggcactgccccgtcttatggaaacccgagcagcgacgtccaggcggatggagccttggggtcccggagcccgccgggagtgggcccagaagaagaggaaggggagggctatgaggaacctgacagtgaggaggactccgagttctatgagaacgactccaaccttgggcaggaccagctctcccaggatggcagcggctacgagaaccctgaggatgagcccctgggtcctgaggatgaagactccttctccaacgctgagtcttatgagaacgaggatgaagagctgacccagccggtcgccaggacaatggacttcctgagccctcatgggtcagcctgggaccccagccgggaagcaacctccctggcagggtcccagtcctatgaggatatgagaggaatcctgtatgcagccccccagctccgctccattcggggccagcctggacccaatcatgaggaagatgcagactcttatgagaacatggataatcccgatgggccagacccagcctggggaggagggggccgcatgggcacctggagcaccagg

SEQ ID NO: 103 - DNA, 579 bp, Homo sapiens
  Interleukin 18 (IL-18), isoform 1
atggctgctgaaccagtagaagacaattgcatcaactttgtggcaatgaaatttattgacaatacgctttactttatagctgaagatgatgaaaacctggaatcagattactttggcaagcttgaatctaaattatcagtcataagaaatttgaatgaccaagttctcttcattgaccaaggaaatcggcctctatttgaagatatgactgattctgactgtagagataatgcaccccggaccatatttattataagtatgtataaagatagccagcctagaggtatggctgtaactatctctgtgaagtgtgagaaaatttcaactctctcctgtgagaacaaaattatttcctttaaggaaatgaatcctcctgataacatcaaggatacaaaaagtgacatcatattctttcagagaagtgtcccaggacatgataataagatgcaatttgaatcttcatcatacgaaggatactttctagcttgtgaaaaagagagagacctttttaaactcattttgaaaaaagaggatgaattgggggatagatctataatgttcactgttcaaaacgaagac

SEQ ID NO: 104 - DNA, 1005 bp, Homo sapiens
  Fas ligand
atgctgggcatctggaccctcctacctctggttcttacgtctgttgctagattatcgtccaaaagtgttaatgcccaagtgactgacatcaactccaagggattggaattgaggaagactgttactacagttgagactcagaacttggaaggcctgcatcatgatggccaattctgccataagccctgtcctccaggtgaaaggaaagctagggactgcacagtcaatggggatgaaccagactgcgtgccctgccaagaagggaaggagtacacagacaaagcccatttttcttccaaatgcagaagatgtagattgtgtgatgaaggacatggcttagaagtggaaataaactgcacccggacccagaataccaagtgcagatgtaaaccaaactttttttgtaactctactgtatgtgaacactgtgacccttgcaccaaatgtgaacatggaatcatcaaggaatgcacactcaccagcaacaccaagtgcaaagaggaaggatccagatctaacttggggtggctttgtcttcttcttttgccaattccactaattgtttgggtgaagagaaaggaagtacagaaaacatgcagaaagcacagaaaggaaaaccaaggttctcatgaatctccaactttaaatcctgaaacagtggcaataaatttatctgatgttgacttgagtaaatatatcaccactattgctggagtcatgacactaagtcaagttaaaggctttgttcgaaagaatggtgtcaatgaagccaaaatagatgagatcaagaatgacaatgtccaagacacagcagaacagaaagttcaactgcttcgtaattggcatcaacttcatggaaagaaagaagcgtatgacacattgattaaagatctcaaaaaagccaatctttgtactcttgcagagaaaattcagactatcatcctcaaggacattactagtgactcagaaaattcaaacttcagaaatgaaatccaaagcttggtc

SEQ ID NO: 105 - DNA, 1023 bp, Salmonella typhimurium
  firA/SSC
atgccttcaattcgactggctgacttagcagaacagttggatgcagaattacacggtgatggcgatatcgtcatcaccggcgttgcgtccatgcaatctgcaacaacaggccacattacgtttatggtgaatcctaagtaccgtgaacacttaggtttatgccaggcttctgcggttgtcatgacgcaggacgatcttccttttgctaagagtgcggcgctggtagttaaaaatccctacctgacctacgcgcgcatggcgcaaattttagatactacgccgcagcccgcgcagaatatcgcgccaagcgccgtgattgatgcgacggcaacgctgggtagcaatgtttcagtcggcgcgaatgcggtgattgaatctggcgtacaactgggcgataacgtggttatcggcgcaggctgtttcgtcggaaaaaatagcaaaatcggggcgggttcacgcttgtgggcgaacgtaacgatttaccacgacattcagatcggtgagaattgcctgatccagtccagtacggtgatcggcgcggacggttttggctacgctaacgatcgtggcaactgggtgaagatcccacaactgggccgggtcattattggcgatcgtgtcgagatcggcgcttgtaccaccattgaccgtggcgcgttggatgatactgttattggcaatggcgtgattattgataatcagtgccagattgcacataacgtcgtgattggcgacaatacggcagttgccggtggcgtcattatggcgggtagcctgaagattggccgttactgcatgattggcggcgccagcgtgatcaatgggcatatggaaatatgcgacaaagtcacggtaactggcatgggtatggtgatgcgtcccatcacggaaccgggcgtctactcctcaggcattccgctgcaacccaacaaagtatggcgtaaaactgctgcactggtgatgaacattgatgatatgagcaagcgtctcaaagcgattgagcgcaaggttaatcaacaagac

SEQ ID NO: 106 - DNA, 918 bp, E. coli
  htrB
atgacgaatctacccaagttctccaccgcactgcttcatccgcgttattggttaacctggttgggtattggcgtactttggttagtcgtgcaattgccctacccggttatctaccgcctcggttgtggattaggaaaactggcgttacgttttatgaaacgacgcgcaaaaattgtgcatcgcaacctggaactgtgcttcccggaaatgagcgaacaagaacgccgtaaaatggtggtgaagaatttcgaatccgttggcatgggcctgatggaaaccggcatggcgtggttctggccggaccgccgaatcgcccgctggacggaagtgatcggcatggaacacattcgtgacgtgcaggcgcaaaaacgcggcatcctgttagttggcatccattttctgacactggagctgggtgcgcggcagtttggtatgcaggaaccgggtattggcgtttatcgcccgaacgataatccactgattgactggctacaaacctggggccgtttgcgctcaaataaatcgatgctcgaccgcaaagatttaaaaggcatgattaaagccctgaaaaaaggcgaagtggtctggtacgcaccggatcatgattacggcccgcgctcaagcgttttcgtcccgttgtttgccgttgagcaggctgcgaccacgaccggaacctggatgctggcacggatgtccggcgcatgtctggtgcccttcgttccacgccgtaagccagatggcaaagggtatcaattgattatgctgccgccagagtgttctccgccactggatgatgccgaaactaccgccgcgtggatgaacaaagtggtcgaaaaatgcatcatgatggcaccagagcagtatatgtggttacaccgtcgctttaaaacacgcccggaaggcgttccttcacgctat

SEQ ID NO: 107 - DNA, 717 bp, Salmonella typhimurium
  ompR
atgcaagagaattataagattctggtggttgatgacgatatgcgtctgcgggcgctactggaacgttatctgaccgagcagggcttccaggttcgaagcgtcgctaacgctgagcagatggatcgtctgctgacccgtgaatctttccatctcatggtactggatttaatgctgccaggtgaagatggtctgtcgatttgtcgtcgcctgcgtagtcaaagtaatccaatgccgatcattatggtcacggcgaagggtgaagaggttgaccgtatcgtcgggctggaaatcggcgccgatgactacattcctaaaccgtttaacccgcgcgagctgttggcgcgtattcggcccgtgttacgtcgtcaggcaaacgaactgcccggcgcgccgtcgcaggaagaggccgttatcgcgttcggtaagtttaaactgaacctcggtacgcgcgagatgttccgtgaagatgaaccgatgccgctgaccagcggggagtttgcggtactgaaagcgttagtcagccatccgcgcgagccgctctctcgcgataagctgatgaatctggcccgtggccgcgagtattccgcgatggaacgctccatcgacgtccagatctcccgcctgcgccgtatggtggaagaagatccggcacatccgcgttatattcagaccgtctggggcctgggctacgtctttgtaccggacggttctaaagca

SEQ ID NO: 108 - DNA, 498 bp, Homo sapiens
  Inteferon (IFN) gamma
atgaaatatacaagttatatcttggcttttcagctctgcatcgttttgggttctcttggctgttactgccaggacccatatgtaaaagaagcagaaaaccttaagaaatattttaatgcaggtcattcagatgtagcggataatggaactcttttcttaggcattttgaagaattggaaagaggagagtgacagaaaaataatgcagagccaaattgtctccttttacttcaaactttttaaaaactttaaagatgaccagagcatccaaaagagtgtggagaccatcaaggaagacatgaatgtcaagtttttcaatagcaacaaaaagaaacgagatgacttcgaaaagctgactaattattcggtaactgacttgaatgtccaacgcaaagcaatacatgaactcatccaagtgatggctgaactgtcgccagcagctaaaacagggaagcgaaaaaggagtcagatgctgtttcgaggtcgaagagcatcccag

SEQ ID NO: 109 - DNA, 699 bp, Homo sapiens
  Tumor necrosis factor (TNF) alpha
atgagcactgaaagcatgatccgggacgtggagctggccgaggaggcgctccccaagaagacaggggggccccagggctccaggcggtgcttgttcctcagcctcttctccttcctgatcgtggcaggcgccaccacgctcttctgcctgctgcactttggagtgatcggcccccagagggaagagttccccagggacctctctctaatcagccctctggcccaggcagtcagatcatcttctcgaaccccgagtgacaagcctgtagcccatgttgtagcaaaccctcaagctgaggggcagctccagtggctgaaccgccgggccaatgccctcctggccaatggcgtggagctgagagataaccagctggtggtgccatcagagggcctgtacctcatctactcccaggtcctcttcaagggccaaggctgcccctccacccatgtgctcctcacccacaccatcagccgcatcgccgtctcctaccagaccaaggtcaacctcctctctgccatcaagagcccctgccagagggagaccccagagggggctgaggccaagccctggtatgagcccatctatctgggaggggtcttccagctggagaagggtgaccgactcagcgctgagatcaatcggcccgactatctcgactttgccgagtctgggcaggtctactttgggatcattgccctg

SEQ ID NO: 110 - DNA, 825 bp, Homo sapiens
  Atg5 long isoform
atgacagatgacaaagatgtgcttcgagatgtgtggtttggacgaattccaacttgtttcacgctatatcaggatgagataactgaaagggaagcagaaccatactatttgcttttgccaagagtaagttatttgacgttggtaactgacaaagtgaaaaagcactttcagaaggttatgagacaagaagacattagtgagatatggtttgaatatgaaggcacaccactgaaatggcattatccaattggtttgctatttgatcttcttgcatcaagttcagctcttccttggaacatcacagtacattttaagagttttccagaaaaagaccttctgcactgtccatctaaggatgcaattgaagctcattttatgtcatgtatgaaagaagctgatgctttaaaacataaaagtcaagtaatcaatgaaatgcagaaaaaagatcacaagcaactctggatgggattgcaaaatgacagatttgaccagttttgggccatcaatcggaaactcatggaatatcctgcagaagaaaatggatttcgttatatcccctttagaatatatcagacaacgactgaaagacctttcattcagaagctgtttcgtcctgtggctgcagatggacagttgcacacactaggagatctcctcaaagaagtttgtccttctgctattgatcctgaagatggggaaaaaaagaatcaagtgatgattcatggaattgagccaatgttggaaacacctctgcagtggctgagtgaacatctgagctacccggataattttcttcatattagtatcatcccacagccaacagat

SEQ ID NO: 111 - DNA, 1350 bp, Homo sapiens
  Beclin1
atggaagggtctaagacgtccaacaacagcaccatgcaggtgagcttcgtgtgccagcgctgcagccagcccctgaaactggacacgagtttcaagatcctggaccgtgtcaccatccaggaactcacagctccattacttaccacagcccaggcgaaaccaggagagacccaggaggaagagactaactcaggagaggagccatttattgaaactcctcgccaggatggtgtctctcgcagattcatccccccagccaggatgatgtccacagaaagtgccaacagcttcactctgattggggaggcatctgatggcggcaccatggagaacctcagccgaagactgaaggtcactggggacctttttgacatcatgtcgggccagacagatgtggatcacccactctgtgaggaatgcacagatactcttttagaccagctggacactcagctcaacgtcactgaaaatgagtgtcagaactacaaacgctgtttggagatcttagagcaaatgaatgaggatgacagtgaacagttacagatggagctaaaggagctggcactagaggaggagaggctgatccaggagctggaagacgtggaaaagaaccgcaagatagtggcagaaaatctcgagaaggtccaggctgaggctgagagactggatcaggaggaagctcagtatcagagagaatacagtgaatttaaacgacagcagctggagctggatgatgagctgaagagtgttgaaaaccagatgcgttatgcccagacgcagctggataagctgaagaaaaccaacgtctttaatgcaaccttccacatctggcacagtggacagtttggcacaatcaataacttcaggctgggtcgcctgcccagtgttcccgtggaatggaatgagattaatgctgcttggggccagactgtgttgctgctccatgctctggccaataagatgggtctgaaatttcagagataccgacttgttccttacggaaaccattcatatctggagtctctgacagacaaatctaaggagctgccgttatactgttctggggggttgcggtttttctgggacaacaagtttgaccatgcaatggtggctttcctggactgtgtgcagcagttcaaagaagaggttgagaaaggcgagacacgtttttgtcttccctacaggatggatgtggagaaaggcaagattgaagacacaggaggcagtggcggctcctattccatcaaaacccagtttaactctgaggagcagtggacaaaagctctcaagttcatgctgacgaatcttaagtggggtcttgcttgggtgtcctcacaattttataacaaa

SEQ ID NO: 112 - DNA, 2352 bp, Homo sapiens
  Toll-like receptor 2 (TLR2)
atgccacatactttgtggatggtgtgggtcttgggggtcatcatcagcctctccaaggaagaatcctccaatcaggcttctctgtcttgtgaccgcaatggtatctgcaagggcagctcaggatctttaaactccattccctcagggctcacagaagctgtaaaaagccttgacctgtccaacaacaggatcacctacattagcaacagtgacctacagaggtgtgtgaacctccaggctctggtgctgacatccaatggaattaacacaatagaggaagattctttttcttccctgggcagtcttgaacatttagacttatcctataattacttatctaatttatcgtcttcctggttcaagcccctttcttctttaacattcttaaacttactgggaaatccttacaaaaccctaggggaaacatctcttttttctcatctcacaaaattgcaaatcctgagagtgggaaatatggacaccttcactaagattcaaagaaaagattttgctggacttaccttccttgaggaacttgagattgatgcttcagatctacagagctatgagccaaaaagtttgaagtcaattcagaatgtaagtcatctgatccttcatatgaagcagcatattttactgctggagatttttgtagatgttacaagttccgtggaatgtttggaactgcgagatactgatttggacactttccatttttcagaactatccactggtgaaacaaattcattgattaaaaagtttacatttagaaatgtgaaaatcaccgatgaaagtttgtttcaggttatgaaacttttgaatcagatttctggattgttagaattagagtttgatgactgtacccttaatggagttggtaattttagagcatctgataatgacagagttatagatccaggtaaagtggaaacgttaacaatccggaggctgcatattccaaggttttacttattttatgatctgagcactttatattcacttacagaaagagttaaaagaatcacagtagaaaacagtaaagtttttctggttccttgtttactttcacaacatttaaaatcattagaatacttggatctcagtgaaaatttgatggttgaagaatacttgaaaaattcagcctgtgaggatgcctggccctctctacaaactttaattttaaggcaaaatcatttggcatcattggaaaaaaccggagagactttgctcactctgaaaaacttgactaacattgatatcagtaagaatagttttcattctatgcctgaaacttgtcagtggccagaaaagatgaaatatttgaacttatccagcacacgaatacacagtgtaacaggctgcattcccaagacactggaaattttagatgttagcaacaacaatctcaatttattttctttgaatttgccgcaactcaaagaactttatatttccagaaataagttgatgactctaccagatgcctccctcttacccatgttactagtattgaaaatcagtaggaatgcaataactacgttttctaaggagcaacttgactcatttcacacactgaagactttggaagctggtggcaataacttcatttgctcctgtgaattcctctccttcactcaggagcagcaagcactggccaaagtcttgattgattggccagcaaattacctgtgtgactctccatcccatgtgcgtggccagcaggttcaggatgtccgcctctcggtgtcggaatgtcacaggacagcactggtgtctggcatgtgctgtgctctgttcctgctgatcctgctcacgggggtcctgtgccaccgtttccatggcctgtggtatatgaaaatgatgtgggcctggctccaggccaaaaggaagcccaggaaagctcccagcaggaacatctgctatgatgcatttgtttcttacagtgagcgggatgcctactgggtggagaaccttatggtccaggagctggagaacttcaatccccccttcaagttgtgtcttcataagcgggacttcattcctggcaagtggatcattgacaatatcattgactccattgaaaagagccacaaaactgtctttgtgctttctgaaaactttgtgaagagtgagtggtgcaagtatgaactggacttctcccatttccgtctttttgatgagaacaatgatgctgccattctcattcttctggagcccattgagaaaaaagccattccccagcgcttctgcaagctgcggaagataatgaacaccaagacctacctggagtggcccatggacgaggctcagcgggaaggattttgggtaaatctgagagctgcgataaagtcc

SEQ ID NO: 113 - DNA, 2517 bp, Homo sapiens
  TLR4, isoform 1
atgatgtctgcctcgcgcctggctgggactctgatcccagccatggccttcctctcctgcgtgagaccagaaagctgggagccctgcgtggaggtggttcctaatattacttatcaatgcatggagctgaatttctacaaaatccccgacaacctccccttctcaaccaagaacctggacctgagctttaatcccctgaggcatttaggcagctatagcttcttcagtttcccagaactgcaggtgctggatttatccaggtgtgaaatccagacaattgaagatggggcatatcagagcctaagccacctctctaccttaatattgacaggaaaccccatccagagtttagccctgggagccttttctggactatcaagtttacagaagctggtggctgtggagacaaatctagcatctctagagaacttccccattggacatctcaaaactttgaaagaacttaatgtggctcacaatcttatccaatctttcaaattacctgagtatttttctaatctgaccaatctagagcacttggacctttccagcaacaagattcaaagtatttattgcacagacttgcgggttctacatcaaatgcccctactcaatctctctttagacctgtccctgaaccctatgaactttatccaaccaggtgcatttaaagaaattaggcttcataagctgactttaagaaataattttgatagtttaaatgtaatgaaaacttgtattcaaggtctggctggtttagaagtccatcgtttggttctgggagaatttagaaatgaaggaaacttggaaaagtttgacaaatctgctctagagggcctgtgcaatttgaccattgaagaattccgattagcatacttagactactacctcgatgatattattgacttatttaattgtttgacaaatgtttcttcattttccctggtgagtgtgactattgaaagggtaaaagacttttcttataatttcggatggcaacatttagaattagttaactgtaaatttggacagtttcccacattgaaactcaaatctctcaaaaggcttactttcacttccaacaaaggtgggaatgctttttcagaagttgatctaccaagccttgagtttctagatctcagtagaaatggcttgagtttcaaaggttgctgttctcaaagtgattttgggacaaccagcctaaagtatttagatctgagcttcaatggtgttattaccatgagttcaaacttcttgggcttagaacaactagaacatctggatttccagcattccaatttgaaacaaatgagtgagttttcagtattcctatcactcagaaacctcatttaccttgacatttctcatactcacaccagagttgctttcaatggcatcttcaatggcttgtccagtctcgaagtcttgaaaatggctggcaattctttccaggaaaacttccttccagatatcttcacagagctgagaaacttgaccttcctggacctctctcagtgtcaactggagcagttgtctccaacagcatttaactcactctccagtcttcaggtactaaatatgagccacaacaacttcttttcattggatacgtttccttataagtgtctgaactccctccaggttcttgattacagtctcaatcacataatgacttccaaaaaacaggaactacagcattttccaagtagtctagctttcttaaatcttactcagaatgactttgcttgtacttgtgaacaccagagtttcctgcaatggatcaaggaccagaggcagctcttggtggaagttgaacgaatggaatgtgcaacaccttcagataagcagggcatgcctgtgctgagtttgaatatcacctgtcagatgaataagaccatcattggtgtgtcggtcctcagtgtgcttgtagtatctgttgtagcagttctggtctataagttctattttcacctgatgcttcttgctggctgcataaagtatggtagaggtgaaaacatctatgatgcctttgttatctactcaagccaggatgaggactgggtaaggaatgagctagtaaagaatttagaagaaggggtgcctccatttcagctctgccttcactacagagactttattcccggtgtggccattgctgccaacatcatccatgaaggtttccataaaagccgaaaggtgattgttgtggtgtcccagcacttcatccagagccgctggtgtatctttgaatatgagattgctcagacctggcagtttctgagcagtcgtgctggtatcatcttcattgtcctgcagaaggtggagaagaccctgctcaggcagcaggtggagctgtaccgccttctcagcaggaacacttacctggagtgggaggacagtgtcctggggcggcacatcttctggagacgactcagaaaagccctgctggatggtaaatcatggaatccagaaggaacagtgggtacaggatgcaattggcaggaagcaacatctatc

SEQ ID NO: 114 - DNA, 2574 bp, Homo sapiens
  TLR5
atgggagaccacctggaccttctcctaggagtggtgctcatggccggtcctgtgtttggaattccttcctgctcctttgatggccgaatagccttttatcgtttctgcaacctcacccaggtcccccaggtcctcaacaccactgagaggctcctgctgagcttcaactatatcaggacagtcactgcttcatccttcccctttctggaacagctgcagctgctggagctcgggagccagtatacccccttgactattgacaaggaggccttcagaaacctgcccaaccttagaatcttggacctgggaagtagtaagatatacttcttgcatccagatgcttttcagggactgttccatctgtttgaacttagactgtatttctgtggtctctctgatgctgtattgaaagatggttatttcagaaatttaaaggctttaactcgcttggatctatccaaaaatcagattcgtagcctttaccttcatccttcatttgggaagttgaattccttaaagtccatagatttttcctccaaccaaatattccttgtatgtgaacatgagctcgagcccctacaagggaaaacgctctccttttttagcctcgcagctaatagcttgtatagcagagtctcagtggactggggaaaatgtatgaacccattcagaaacatggtgctggagatactagatgtttctggaaatggctggacagtggacatcacaggaaactttagcaatgccatcagcaaaagccaggccttctctttgattcttgcccaccacatcatgggtgccgggtttggcttccataacatcaaagatcctgaccagaacacatttgctggcctggccagaagttcagtgagacacctggatctttcacatgggtttgtcttctccctgaactcacgagtctttgagacactcaaggatttgaaggttctgaaccttgcctacaacaagataaataagattgcagatgaagcattttacggacttgacaacctccaagttctcaatttgtcatataaccttctgggggaactttacagttcgaatttctatggactacctaaggtagcctacattgatttgcaaaagaatcacattgcaataattcaagaccaaacattcaaattcctggaaaaattacagaccttggatctccgagacaatgctcttacaaccattcattttattccaagcatacccgatatcttcttgagtggcaataaactagtgactttgccaaagatcaaccttacagcgaacctcatccacttatcagaaaacaggctagaaaatctagatattctctactttctcctacgggtacctcatctccagattctcattttaaatcaaaatcgcttctcctcctgtagtggagatcaaaccccttcagagaatcccagcttagaacagcttttccttggagaaaatatgttgcaacttgcctgggaaactgagctctgttgggatgtttttgagggactttctcatcttcaagttctgtatttgaatcataactatcttaattcccttccaccaggagtatttagccatctgactgcattaaggggactaagcctcaactccaacaggctgacagttctttctcacaatgatttacctgctaatttagagatcctggacatatccaggaaccagctcctagctcctaatcctgatgtatttgtatcacttagtgtcttggatataactcataacaagttcatttgtgaatgtgaacttagcacttttatcaattggcttaatcacaccaatgtcactatagctgggcctcctgcagacatatattgtgtgtaccctgactcgttctctggggtttccctcttctctctttccacggaaggttgtgatgaagaggaagtcttaaagtccctaaagttctcccttttcattgtatgcactgtcactctgactctgttcctcatgaccatcctcacagtcacaaagttccggggcttctgttttatctgttataagacagcccagagactggtgttcaaggaccatccccagggcacagaacctgatatgtacaaatatgatgcctatttgtgcttcagcagcaaagacttcacatgggtgcagaatgctttgctcaaacacctggacactcaatacagtgaccaaaacagattcaacctgtgctttgaagaaagagactttgtcccaggagaaaaccgcattgccaatatccaggatgccatctggaacagtagaaagatcgtttgtcttgtgagcagacacttccttagagatggctggtgccttgaagccttcagttatgcccagggcaggtgcttatctgaccttaacagtgctctcatcatggtggtggttgggtccttgtcccagtaccagttgatgaaacatcaatccatcagaggctttgtacagaaacagcagtatttgaggtggcctgaggatctccaggatgttggctggtttcttcataaactctctcaacagatactaaagaaagaaaaagaaaagaagaaagacaataacattccgttgcaaactgtagcaaccatctcc

SEQ ID NO: 115 - DNA, 2712 bp, Homo sapiens
  TLR3, isoform 1
atgagacagactttgccttgtatctacttttgggggggccttttgccctttgggatgctgtgtgcatcctccaccaccaagtgcactgttagccatgaagttgctgactgcagccacctgaagttgactcaggtacccgatgatctacccacaaacataacagtgttgaaccttacccataatcaactcagaagattaccagccgccaacttcacaaggtatagccagctaactagcttggatgtaggatttaacaccatctcaaaactggagccagaattgtgccagaaacttcccatgttaaaagttttgaacctccagcacaatgagctatctcaactttctgataaaacctttgccttctgcacgaatttgactgaactccatctcatgtccaactcaatccagaaaattaaaaataatccctttgtcaagcagaagaatttaatcacattagatctgtctcataatggcttgtcatctacaaaattaggaactcaggttcagctggaaaatctccaagagcttctattatcaaacaataaaattcaagcgctaaaaagtgaagaactggatatctttgccaattcatctttaaaaaaattagagttgtcatcgaatcaaattaaagagttttctccagggtgttttcacgcaattggaagattatttggcctctttctgaacaatgtccagctgggtcccagccttacagagaagctatgtttggaattagcaaacacaagcattcggaatctgtctctgagtaacagccagctgtccaccaccagcaatacaactttcttgggactaaagtggacaaatctcactatgctcgatctttcctacaacaacttaaatgtggttggtaacgattcctttgcttggcttccacaactagaatatttcttcctagagtataataatatacagcatttgttttctcactctttgcacgggcttttcaatgtgaggtacctgaatttgaaacggtcttttactaaacaaagtatttcccttgcctcactccccaagattgatgatttttcttttcagtggctaaaatgtttggagcaccttaacatggaagataatgatattccaggcataaaaagcaatatgttcacaggattgataaacctgaaatacttaagtctatccaactcctttacaagtttgcgaactttgacaaatgaaacatttgtatcacttgctcattctcccttacacatactcaacctaaccaagaataaaatctcaaaaatagagagtgatgctttctcttggttgggccacctagaagtacttgacctgggccttaatgaaattgggcaagaactcacaggccaggaatggagaggtctagaaaatattttcgaaatctatctttcctacaacaagtacctgcagctgactaggaactcctttgccttggtcccaagccttcaacgactgatgctccgaagggtggcccttaaaaatgtggatagctctccttcaccattccagcctcttcgtaacttgaccattctggatctaagcaacaacaacatagccaacataaatgatgacatgttggagggtcttgagaaactagaaattctcgatttgcagcataacaacttagcacggctctggaaacacgcaaaccctggtggtcccatttatttcctaaagggtctgtctcacctccacatccttaacttggagtccaacggctttgacgagatcccagttgaggtcttcaaggatttatttgaactaaagatcatcgatttaggattgaataatttaaacacacttccagcatctgtctttaataatcaggtgtctctaaagtcattgaaccttcagaagaatctcataacatccgttgagaagaaggttttcgggccagctttcaggaacctgactgagttagatatgcgctttaatccctttgattgcacgtgtgaaagtattgcctggtttgttaattggattaacgagacccataccaacatccctgagctgtcaagccactacctttgcaacactccacctcactatcatgggttcccagtgagactttttgatacatcatcttgcaaagacagtgccccctttgaactctttttcatgatcaataccagtatcctgttgatttttatctttattgtacttctcatccactttgagggctggaggatatctttttattggaatgtttcagtacatcgagttcttggtttcaaagaaatagacagacagacagaacagtttgaatatgcagcatatataattcatgcctataaagataaggattgggtctgggaacatttctcttcaatggaaaaggaagaccaatctctcaaattttgtctggaagaaagggactttgaggcgggtgtttttgaactagaagcaattgttaacagcatcaaaagaagcagaaaaattatttttgttataacacaccatctattaaaagacccattatgcaaaagattcaaggtacatcatgcagttcaacaagctattgaacaaaatctggattccattatattggttttccttgaggagattccagattataaactgaaccatgcactctgtttgcgaagaggaatgtttaaatctcactgcatcttgaactggccagttcagaaagaacggataggtgcctttcgtcataaattgcaagtagcacttggatccaaaaactctgtacat

SEQ ID NO: 116 - DNA, 3096 bp, Homo sapiens
  TLR9
atgggtttctgccgcagcgccctgcacccgctgtctctcctggtgcaggccatcatgctggccatgaccctggccctgggtaccttgcctgccttcctaccctgtgagctccagccccacggcctggtgaactgcaactggctgttcctgaagtctgtgccccacttctccatggcagcaccccgtggcaatgtcaccagcctttccttgtcctccaaccgcatccaccacctccatgattctgactttgcccacctgcccagcctgcggcatctcaacctcaagtggaactgcccgccggttggcctcagccccatgcacttcccctgccacatgaccatcgagcccagcaccttcttggctgtgcccaccctggaagagctaaacctgagctacaacaacatcatgactgtgcctgcgctgcccaaatccctcatatccctgtccctcagccataccaacatcctgatgctagactctgccagcctcgccggcctgcatgccctgcgcttcctattcatggacggcaactgttattacaagaacccctgcaggcaggcactggaggtggccccgggtgccctccttggcctgggcaacctcacccacctgtcactcaagtacaacaacctcactgtggtgccccgcaacctgccttccagcctggagtatctgctgttgtcctacaaccgcatcgtcaaactggcgcctgaggacctggccaatctgaccgccctgcgtgtgctcgatgtgggcggaaattgccgccgctgcgaccacgctcccaacccctgcatggagtgccctcgtcacttcccccagctacatcccgataccttcagccacctgagccgtcttgaaggcctggtgttgaaggacagttctctctcctggctgaatgccagttggttccgtgggctgggaaacctccgagtgctggacctgagtgagaacttcctctacaaatgcatcactaaaaccaaggccttccagggcctaacacagctgcgcaagcttaacctgtccttcaattaccaaaagagggtgtcctttgcccacctgtctctggccccttccttcgggagcctggtcgccctgaaggagctggacatgcacggcatcttcttccgctcactcgatgagaccacgctccggccactggcccgcctgcccatgctccagactctgcgtctgcagatgaacttcatcaaccaggcccagctcggcatcttcagggccttccctggcctgcgctacgtggacctgtcggacaaccgcatcagcggagcttcggagctgacagccaccatgggggaggcagatggaggggagaaggtctggctgcagcctggggaccttgctccggccccagtggacactcccagctctgaagacttcaggcccaactgcagcaccctcaacttcaccttggatctgtcacggaacaacctggtgaccgtgcagccggagatgtttgcccagctctcgcacctgcagtgcctgcgcctgagccacaactgcatctcgcaggcagtcaatggctcccagttcctgccgctgaccggtctgcaggtgctagacctgtcccacaataagctggacctctaccacgagcactcattcacggagctaccgcgactggaggccctggacctcagctacaacagccagccctttggcatgcagggcgtgggccacaacttcagcttcgtggctcacctgcgcaccctgcgccacctcagcctggcccacaacaacatccacagccaagtgtcccagcagctctgcagtacgtcgctgcgggccctggacttcagcggcaatgcactgggccatatgtgggccgagggagacctctatctgcacttcttccaaggcctgagcggtttgatctggctggacttgtcccagaaccgcctgcacaccctcctgccccaaaccctgcgcaacctccccaagagcctacaggtgctgcgtctccgtgacaattacctggccttctttaagtggtggagcctccacttcctgcccaaactggaagtcctcgacctggcaggaaaccagctgaaggccctgaccaatggcagcctgcctgctggcacccggctccggaggctggatgtcagctgcaacagcatcagcttcgtggcccccggcttcttttccaaggccaaggagctgcgagagctcaaccttagcgccaacgccctcaagacagtggaccactcctggtttgggcccctggcgagtgccctgcaaatactagatgtaagcgccaaccctctgcactgcgcctgtggggcggcctttatggacttcctgctggaggtgcaggctgccgtgcccggtctgcccagccgggtgaagtgtggcagtccgggccagctccagggcctcagcatctttgcacaggacctgcgcctctgcctggatgaggccctctcctgggactgtttcgccctctcgctgctggctgtggctctgggcctgggtgtgcccatgctgcatcacctctgtggctgggacctctggtactgcttccacctgtgcctggcctggcttccctggcgggggcggcaaagtgggcgagatgaggatgccctgccctacgatgccttcgtggtcttcgacaaaacgcagagcgcagtggcagactgggtgtacaacgagcttcgggggcagctggaggagtgccgtgggcgctgggcactccgcctgtgcctggaggaacgcgactggctgcctggcaaaaccctctttgagaacctgtgggcctcggtctatggcagccgcaagacgctgtttgtgctggcccacacggaccgggtcagtggtctcttgcgcgccagcttcctgctggcccagcagcgcctgctggaggaccgcaaggacgtcgtggtgctggtgatcctgagccctgacggccgccgctcccgctacgtgcggctgcgccagcgcctctgccgccagagtgtcctcctctggccccaccagcccagtggtcagcgcagcttctgggcccagctgggcatggccctgaccagggacaaccaccacttctataaccggaacttctgccagggacccacggccgaa

SEQ ID NO: 117 - DNA, 3147 bp, Homo sapiens
  TLR7
atggtgtttccaatgtggacactgaagagacaaattcttatcctttttaacataatcctaatttccaaactccttggggctagatggtttcctaaaactctgccctgtgatgtcactctggatgttccaaagaaccatgtgatcgtggactgcacagacaagcatttgacagaaattcctggaggtattcccacgaacaccacgaacctcaccctcaccattaaccacataccagacatctccccagcgtcctttcacagactggaccatctggtagagatcgatttcagatgcaactgtgtacctattccactggggtcaaaaaacaacatgtgcatcaagaggctgcagattaaacccagaagctttagtggactcacttatttaaaatccctttacctggatggaaaccagctactagagataccgcagggcctcccgcctagcttacagcttctcagccttgaggccaacaacatcttttccatcagaaaagagaatctaacagaactggccaacatagaaatactctacctgggccaaaactgttattatcgaaatccttgttatgtttcatattcaatagagaaagatgccttcctaaacttgacaaagttaaaagtgctctccctgaaagataacaatgtcacagccgtccctactgttttgccatctactttaacagaactatatctctacaacaacatgattgcaaaaatccaagaagatgattttaataacctcaaccaattacaaattcttgacctaagtggaaattgccctcgttgttataatgccccatttccttgtgcgccgtgtaaaaataattctcccctacagatccctgtaaatgcttttgatgcgctgacagaattaaaagttttacgtctacacagtaactctcttcagcatgtgcccccaagatggtttaagaacatcaacaaactccaggaactggatctgtcccaaaacttcttggccaaagaaattggggatgctaaatttctgcattttctccccagcctcatccaattggatctgtctttcaattttgaacttcaggtctatcgtgcatctatgaatctatcacaagcattttcttcactgaaaagcctgaaaattctgcggatcagaggatatgtctttaaagagttgaaaagctttaacctctcgccattacataatcttcaaaatcttgaagttcttgatcttggcactaactttataaaaattgctaacctcagcatgtttaaacaatttaaaagactgaaagtcatagatctttcagtgaataaaatatcaccttcaggagattcaagtgaagttggcttctgctcaaatgccagaacttctgtagaaagttatgaaccccaggtcctggaacaattacattatttcagatatgataagtatgcaaggagttgcagattcaaaaacaaagaggcttctttcatgtctgttaatgaaagctgctacaagtatgggcagaccttggatctaagtaaaaatagtatattttttgtcaagtcctctgattttcagcatctttctttcctcaaatgcctgaatctgtcaggaaatctcattagccaaactcttaatggcagtgaattccaacctttagcagagctgagatatttggacttctccaacaaccggcttgatttactccattcaacagcatttgaagagcttcacaaactggaagttctggatataagcagtaatagccattattttcaatcagaaggaattactcatatgctaaactttaccaagaacctaaaggttctgcagaaactgatgatgaacgacaatgacatctcttcctccaccagcaggaccatggagagtgagtctcttagaactctggaattcagaggaaatcacttagatgttttatggagagaaggtgataacagatacttacaattattcaagaatctgctaaaattagaggaattagacatctctaaaaattccctaagtttcttgccttctggagtttttgatggtatgcctccaaatctaaagaatctctctttggccaaaaatgggctcaaatctttcagttggaagaaactccagtgtctaaagaacctggaaactttggacctcagccacaaccaactgaccactgtccctgagagattatccaactgttccagaagcctcaagaatctgattcttaagaataatcaaatcaggagtctgacgaagtattttctacaagatgccttccagttgcgatatctggatctcagctcaaataaaatccagatgatccaaaagaccagcttcccagaaaatgtcctcaacaatctgaagatgttgcttttgcatcataatcggtttctgtgcacctgtgatgctgtgtggtttgtctggtgggttaaccatacggaggtgactattccttacctggccacagatgtgacttgtgtggggccaggagcacacaagggccaaagtgtgatctccctggatctgtacacctgtgagttagatctgactaacctgattctgttctcactttccatatctgtatctctctttctcatggtgatgatgacagcaagtcacctctatttctgggatgtgtggtatatttaccatttctgtaaggccaagataaaggggtatcagcgtctaatatcaccagactgttgctatgatgcttttattgtgtatgacactaaagacccagctgtgaccgagtgggttttggctgagctggtggccaaactggaagacccaagagagaaacattttaatttatgtctcgaggaaagggactggttaccagggcagccagttctggaaaacctttcccagagcatacagcttagcaaaaagacagtgtttgtgatgacagacaagtatgcaaagactgaaaattttaagatagcattttacttgtcccatcagaggctcatggatgaaaaagttgatgtgattatcttgatatttcttgagaagccctttcagaagtccaagttcctccagctccggaaaaggctctgtgggagttctgtccttgagtggccaacaaacccgcaagctcacccatacttctggcagtgtctaaagaacgccctggccacagacaatcatgtggcctatagtcaggtgttcaaggaaacggtc

SEQ ID NO: 118 - DNA, 3177 bp, Homo sapiens
  TLR8, isoform 1
atgaaggagtcatctttgcaaaatagctcctgcagcctgggaaaggagactaaaaaggaaaacatgttccttcagtcgtcaatgctgacctgcattttcctgctaatatctggttcctgtgagttatgcgccgaagaaaatttttctagaagctatccttgtgatgagaaaaagcaaaatgactcagttattgcagagtgcagcaatcgtcgactacaggaagttccccaaacggtgggcaaatatgtgacagaactagacctgtctgataatttcatcacacacataacgaatgaatcatttcaagggctgcaaaatctcactaaaataaatctaaaccacaaccccaatgtacagcaccagaacggaaatcccggtatacaatcaaatggcttgaatatcacagacggggcattcctcaacctaaaaaacctaagggagttactgcttgaagacaaccagttaccccaaataccctctggtttgccagagtctttgacagaacttagtctaattcaaaacaatatatacaacataactaaagagggcatttcaagacttataaacttgaaaaatctctatttggcctggaactgctattttaacaaagtttgcgagaaaactaacatagaagatggagtatttgaaacgctgacaaatttggagttgctatcactatctttcaattctctttcacacgtgccacccaaactgccaagctccctacgcaaactttttctgagcaacacccagatcaaatacattagtgaagaagatttcaagggattgataaatttaacattactagatttaagcgggaactgtccgaggtgcttcaatgccccatttccatgcgtgccttgtgatggtggtgcttcaattaatatagatcgttttgcttttcaaaacttgacccaacttcgatacctaaacctctctagcacttccctcaggaagattaatgctgcctggtttaaaaatatgcctcatctgaaggtgctggatcttgaattcaactatttagtgggagaaatagcctctggggcatttttaacgatgctgccccgcttagaaatacttgacttgtcttttaactatataaaggggagttatccacagcatattaatatttccagaaacttctctaaacttttgtctctacgggcattgcatttaagaggttatgtgttccaggaactcagagaagatgatttccagcccctgatgcagcttccaaacttatcgactatcaacttgggtattaattttattaagcaaatcgatttcaaacttttccaaaatttctccaatctggaaattatttacttgtcagaaaacagaatatcaccgttggtaaaagatacccggcagagttatgcaaatagttcctcttttcaacgtcatatccggaaacgacgctcaacagattttgagtttgacccacattcgaacttttatcatttcacccgtcctttaataaagccacaatgtgctgcttatggaaaagccttagatttaagcctcaacagtattttcttcattgggccaaaccaatttgaaaatcttcctgacattgcctgtttaaatctgtctgcaaatagcaatgctcaagtgttaagtggaactgaattttcagccattcctcatgtcaaatatttggatttgacaaacaatagactagactttgataatgctagtgctcttactgaattgtccgacttggaagttctagatctcagctataattcacactatttcagaatagcaggcgtaacacatcatctagaatttattcaaaatttcacaaatctaaaagttttaaacttgagccacaacaacatttatactttaacagataagtataacctggaaagcaagtccctggtagaattagttttcagtggcaatcgccttgacattttgtggaatgatgatgacaacaggtatatctccattttcaaaggtctcaagaatctgacacgtctggatttatcccttaataggctgaagcacatcccaaatgaagcattccttaatttgccagcgagtctcactgaactacatataaatgataatatgttaaagttttttaactggacattactccagcagtttcctcgtctcgagttgcttgacttacgtggaaacaaactactctttttaactgatagcctatctgactttacatcttcccttcggacactgctgctgagtcataacaggatttcccacctaccctctggctttctttctgaagtcagtagtctgaagcacctcgatttaagttccaatctgctaaaaacaatcaacaaatccgcacttgaaactaagaccaccaccaaattatctatgttggaactacacggaaacccctttgaatgcacctgtgacattggagatttccgaagatggatggatgaacatctgaatgtcaaaattcccagactggtagatgtcatttgtgccagtcctggggatcaaagagggaagagtattgtgagtctggagctaacaacttgtgtttcagatgtcactgcagtgatattatttttcttcacgttctttatcaccaccatggttatgttggctgccctggctcaccatttgttttactgggatgtttggtttatatataatgtgtgtttagctaaggtaaaaggctacaggtctctttccacatcccaaactttctatgatgcttacatttcttatgacaccaaagatgcctctgttactgactgggtgataaatgagctgcgctaccaccttgaagagagccgagacaaaaacgttctcctttgtctagaggagagggattgggacccgggattggccatcatcgacaacctcatgcagagcatcaaccaaagcaagaaaacagtatttgttttaaccaaaaaatatgcaaaaagctggaactttaaaacagctttttacttggctttgcagaggctaatggatgagaacatggatgtgattatatttatcctgctggagccagtgttacagcattctcagtatttgaggctacggcagcggatctgtaagagctccatcctccagtggcctgacaacccgaaggcagaaggcttgttttggcaaactctgagaaatgtggtcttgactgaaaatgattcacggtataacaatatgtatgtcgattccattaagcaatac

SEQ ID NO: 119 - DNA, 636 bp, Homo sapiens
  Interleukin 6 (IL-6)
atgaactccttctccacaagcgccttcggtccagttgccttctccctggggctgctcctggtgttgcctgctgccttccctgccccagtacccccaggagaagattccaaagatgtagccgccccacacagacagccactcacctcttcagaacgaattgacaaacaaattcggtacatcctcgacggcatctcagccctgagaaaggagacatgtaacaagagtaacatgtgtgaaagcagcaaagaggcactggcagaaaacaacctgaaccttccaaagatggctgaaaaagatggatgcttccaatctggattcaatgaggagacttgcctggtgaaaatcatcactggtcttttggagtttgaggtatacctagagtacctccagaacagatttgagagtagtgaggaacaagccagagctgtgcagatgagtacaaaagtcctgatccagttcctgcagaaaaaggcaaagaatctagatgcaataaccacccctgacccaaccacaaatgccagcctgctgacgaagctgcaggcacagaaccagtggctgcaggacatgacaactcatctcattctgcgcagctttaaggagttcctgcagtccagcctgagggctcttcggcaaatg

SEQ ID NO: 120 - DNA, 951 bp, Homo sapiens
  MyD88, isoform 1
atgcgacccgaccgcgctgaggctccaggaccgcccgccatggctgcaggaggtcccggcgcggggtctgcggccccggtctcctccacatcctcccttcccctggctgctctcaacatgcgagtgcggcgccgcctgtctctgttcttgaacgtgcggacacaggtggcggccgactggaccgcgctggcggaggagatggactttgagtacttggagatccggcaactggagacacaagcggaccccactggcaggctgctggacgcctggcagggacgccctggcgcctctgtaggccgactgctcgagctgcttaccaagctgggccgcgacgacgtgctgctggagctgggacccagcattgaggaggattgccaaaagtatatcttgaagcagcagcaggaggaggctgagaagcctttacaggtggccgctgtagacagcagtgtcccacggacagcagagctggcgggcatcaccacacttgatgaccccctggggcatatgcctgagcgtttcgatgccttcatctgctattgccccagcgacatccagtttgtgcaggagatgatccggcaactggaacagacaaactatcgactgaagttgtgtgtgtctgaccgcgatgtcctgcctggcacctgtgtctggtctattgctagtgagctcatcgaaaagaggttggctagaaggccacggggtgggtgccgccggatggtggtggttgtctctgatgattacctgcagagcaaggaatgtgacttccagaccaaatttgcactcagcctctctccaggtgcccatcagaagcgactgatccccatcaagtacaaggcaatgaagaaagagttccccagcatcctgaggttcatcactgtctgcgactacaccaacccctgcaccaaatcttggttctggactcgccttgccaaggccttgtccctgccc

SEQ ID NO: 121 - DNA, 807 bp, Homo sapiens
  Interleukin 1-beta (IL-1beta)
atggcagaagtacctgagctcgccagtgaaatgatggcttattacagtggcaatgaggatgacttgttctttgaagctgatggccctaaacagatgaagtgctccttccaggacctggacctctgccctctggatggcggcatccagctacgaatctccgaccaccactacagcaagggcttcaggcaggccgcgtcagttgttgtggccatggacaagctgaggaagatgctggttccctgcccacagaccttccaggagaatgacctgagcaccttctttcccttcatctttgaagaagaacctatcttcttcgacacatgggataacgaggcttatgtgcacgatgcacctgtacgatcactgaactgcacgctccgggactcacagcaaaaaagcttggtgatgtctggtccatatgaactgaaagctctccacctccagggacaggatatggagcaacaagtggtgttctccatgtcctttgtacaaggagaagaaagtaatgacaaaatacctgtggccttgggcctcaaggaaaagaatctgtacctgtcctgcgtgttgaaagatgataagcccactctacagctggagagtgtagatcccaaaaattacccaaagaagaagatggaaaagcgatttgtcttcaacaagatagaaatcaataacaagctggaatttgagtctgcccagttccccaactggtacatcagcacctctcaagcagaaaacatgcccgtcttcctgggagggaccaaaggcggccaggatataactgacttcaccatgcaatttgtgtcttcc

SEQ ID NO: 122 - DNA, 3075 bp, Homo sapiens
  MDA5/IFIH1, isoform 1
atgtcgaatgggtattccacagacgagaatttccgctatctcatctcgtgcttcagggccagggtgaaaatgtacatccaggtggagcctgtgctggactacctgacctttctgcctgcagaggtgaaggagcagattcagaggacagtcgccacctccgggaacatgcaggcagttgaactgctgctgagcaccttggagaagggagtctggcaccttggttggactcgggaattcgtggaggccctccggagaaccggcagccctctggccgcccgctacatgaaccctgagctcacggacttgccctctccatcgtttgagaacgctcatgatgaatatctccaactgctgaacctccttcagcccactctggtggacaagcttctagttagagacgtcttggataagtgcatggaggaggaactgttgacaattgaagacagaaaccggattgctgctgcagaaaacaatggaaatgaatcaggtgtaagagagctactaaaaaggattgtgcagaaagaaaactggttctctgcatttctgaatgttcttcgtcaaacaggaaacaatgaacttgtccaagagttaacaggctctgattgctcagaaagcaatgcagagattgagaatttatcacaagttgatggtcctcaagtggaagagcaacttctttcaaccacagttcagccaaatctggagaaggaggtctggggcatggagaataactcatcagaatcatcttttgcagattcttctgtagtttcagaatcagacacaagtttggcagaaggaagtgtcagctgcttagatgaaagtcttggacataacagcaacatgggcagtgattcaggcaccatgggaagtgattcagatgaagagaatgtggcagcaagagcatccccggagccagaactccagctcaggccttaccaaatggaagttgcccagccagccttggaagggaagaatatcatcatctgcctccctacagggagtggaaaaaccagagtggctgtttacattgccaaggatcacttagacaagaagaaaaaagcatctgagcctggaaaagttatagttcttgtcaataaggtactgctagttgaacagctcttccgcaaggagttccaaccatttttgaagaaatggtatcgtgttattggattaagtggtgatacccaactgaaaatatcatttccagaagttgtcaagtcctgtgatattattatcagtacagctcaaatccttgaaaactccctcttaaacttggaaaatggagaagatgctggtgttcaattgtcagacttttccctcattatcattgatgaatgtcatcacaccaacaaagaagcagtgtataataacatcatgaggcattatttgatgcagaagttgaaaaacaatagactcaagaaagaaaacaaaccagtgattccccttcctcagatactgggactaacagcttcacctggtgttggaggggccacgaagcaagccaaagctgaagaacacattttaaaactatgtgccaatcttgatgcatttactattaaaactgttaaagaaaaccttgatcaactgaaaaaccaaatacaggagccatgcaagaagtttgccattgcagatgcaaccagagaagatccatttaaagagaaacttctagaaataatgacaaggattcaaacttattgtcaaatgagtccaatgtcagattttggaactcaaccctatgaacaatgggccattcaaatggaaaaaaaagctgcaaaagaaggaaatcgcaaagaacgtgtttgtgcagaacatttgaggaagtacaatgaggccctacaaattaatgacacaattcgaatgatagatgcgtatactcatcttgaaactttctataatgaagagaaagataagaagtttgcagtcatagaagatgatagtgatgagggtggtgatgatgagtattgtgatggtgatgaagatgaggatgatttaaagaaacctttgaaactggatgaaacagatagatttctcatgactttattttttgaaaacaataaaatgttgaaaaggctggctgaaaacccagaatatgaaaatgaaaagctgaccaaattaagaaataccataatggagcaatatactaggactgaggaatcagcacgaggaataatctttacaaaaacacgacagagtgcatatgcgctttcccagtggattactgaaaatgaaaaatttgctgaagtaggagtcaaagcccaccatctgattggagctggacacagcagtgagttcaaacccatgacacagaatgaacaaaaagaagtcattagtaaatttcgcactggaaaaataaatctgcttatcgctaccacagtggcagaagaaggtctggatattaaagaatgtaacattgttatccgttatggtctcgtcaccaatgaaatagccatggtccaggcccgtggtcgagccagagctgatgagagcacctacgtcctggttgctcacagtggttcaggagttatcgaacatgagacagttaatgatttccgagagaagatgatgtataaagctatacattgtgttcaaaatatgaaaccagaggagtatgctcataagattttggaattacagatgcaaagtataatggaaaagaaaatgaaaaccaagagaaatattgccaagcattacaagaataacccatcactaataactttcctttgcaaaaactgcagtgtgctagcctgttctggggaagatatccatgtaattgagaaaatgcatcacgtcaatatgaccccagaattcaaggaactttacattgtaagagaaaacaaagcactgcaaaagaagtgtgccgactatcaaataaatggtgaaatcatctgcaaatgtggccaggcttggggaacaatgatggtgcacaaaggcttagatttgccttgtctcaaaataaggaattttgtagtggttttcaaaaataattcaacaaagaaacaatacaaaaagtgggtagaattacctatcacatttcccaatcttgactattcagaatgctgtttatttagtgatgaggat

SEQ ID NO: 123 - DNA, 1620 bp, Homo sapiens
  IPS-1/MAVS, isoform 1
atgccgtttgctgaagacaagacctataagtatatctgccgcaatttcagcaatttttgcaatgtggatgttgtagagattctgccttacctgccctgcctcacagcaagagaccaggatcgactgcgggccacctgcacactctcagggaaccgggacaccctctggcatctcttcaatacccttcagcggcggcccggctgggtggagtacttcattgcggcactgaggggctgtgagctagttgatctcgcggacgaagtggcctctgtctaccagagctaccagcctcggacctcggaccgtcccccagacccactggagccaccgtcacttcctgctgagaggccagggccccccacacctgctgcggcccacagcatcccctacaacagctgcagagagaaggagccaagttaccccatgcctgtccaggagacccaggcgccagagtccccaggagagaattcagagcaagccctgcagacgctcagccccagagccatcccaaggaatccagatggtggccccctggagtcctcctctgacctggcagccctcagccctctgacctccagcgggcatcaggagcaggacacagaactgggcagtacccacacagcaggtgcgacctccagcctcacaccatcccgtgggcctgtgtctccatctgtctccttccagcccctggcccgttccacccccagggcaagccgcttgcctggacccacagggtcagttgtatctactggcacctccttctcctcctcatcccctggcttggcctctgcaggggctgcagagggtaaacagggtgcagagagtgaccaggccgagcctatcatctgctccagtggggcagaggcacctgccaactctctgccctccaaagtgcctaccaccttgatgcctgtgaacacagtggccctgaaagtgcctgccaacccagcatctgtcagcacagtgccctccaagttgccaactagctcaaagccccctggtgcagtgccttctaatgcgctcaccaatccagcaccatccaaattgcccatcaactcaacccgtgctggcatggtgccatccaaagtgcctactagcatggtgctcaccaaggtgtctgccagcacagtccccactgacgggagcagcagaaatgaggagaccccagcagctccaacacccgccggcgccactggaggcagctcagcctggctagacagcagctctgagaataggggccttgggtcggagctgagtaagcctggcgtgctggcatcccaggtagacagcccgttctcgggctgcttcgaggatcttgccatcagtgccagcacctccttgggcatggggccctgccatggcccagaggagaatgagtataagtccgagggcacctttgggatccacgtggctgagaaccccagcatccagctcctggagggcaaccctgggccacctgcggacccggatggcggccccaggccacaagccgaccggaagttccaggagagggaggtgccatgccacaggccctcacctggggctctgtggctccaggtggctgtgacaggggtgctggtagtcacactcctggtggtgctgtaccggcggcgtctgcac

SEQ ID NO: 124 - DNA, 2775 bp, Homo sapiens
  RIG-1/DDX58, isoform 1
atgaccaccgagcagcgacgcagcctgcaagccttccaggattatatccggaagaccctggaccctacctacatcctgagctacatggccccctggtttagggaggaagaggtgcagtatattcaggctgagaaaaacaacaagggcccaatggaggctgccacactttttctcaagttcctgttggagctccaggaggaaggctggttccgtggctttttggatgccctagaccatgcaggttattctggactttatgaagccattgaaagttgggatttcaaaaaaattgaaaagttggaggagtatagattacttttaaaacgtttacaaccagaatttaaaaccagaattatcccaaccgatatcatttctgatctgtctgaatgtttaattaatcaggaatgtgaagaaattctacagatttgctctactaaggggatgatggcaggtgcagagaaattggtggaatgccttctcagatcagacaaggaaaactggcccaaaactttgaaacttgctttggagaaagaaaggaacaagttcagtgaactgtggattgtagagaaaggtataaaagatgttgaaacagaagatcttgaggataagatggaaacttctgacatacagattttctaccaagaagatccagaatgccagaatcttagtgagaattcatgtccaccttcagaagtgtctgatacaaacttgtacagcccatttaaaccaagaaattaccaattagagcttgctttgcctgctatgaaaggaaaaaacacaataatatgtgctcctacaggttgtggaaaaacctttgtttcactgcttatatgtgaacatcatcttaaaaaattcccacaaggacaaaaggggaaagttgtcttttttgcgaatcagatcccagtgtatgaacagcagaaatctgtattctcaaaatactttgaaagacatgggtatagagttacaggcatttctggagcaacagctgagaatgtcccagtggaacagattgttgagaacaatgacatcatcattttaactccacagattcttgtgaacaaccttaaaaagggaacgattccatcactatccatctttactttgatgatatttgatgaatgccacaacactagtaaacaacacccgtacaatatgatcatgtttaattatctagatcagaaacttggaggatcttcaggcccactgccccaggtcattgggctgactgcctcggttggtgttggggatgccaaaaacacagatgaagccttggattatatctgcaagctgtgtgcttctcttgatgcgtcagtgatagcaacagtcaaacacaatctggaggaactggagcaagttgtttataagccccagaagtttttcaggaaagtggaatcacggattagcgacaaatttaaatacatcatagctcagctgatgagggacacagagagtctggcaaagagaatctgcaaagacctcgaaaacttatctcaaattcaaaatagggaatttggaacacagaaatatgaacaatggattgttacagttcagaaagcatgcatggtgttccagatgccagacaaagatgaagagagcaggatttgtaaagccctgtttttatacacttcacatttgcggaaatataatgatgccctcattatcagtgagcatgcacgaatgaaagatgctctggattacttgaaagacttcttcagcaatgtccgagcagcaggattcgatgagattgagcaagatcttactcagagatttgaagaaaagctgcaggaactagaaagtgtttccagggatcccagcaatgagaatcctaaacttgaagacctctgcttcatcttacaagaagagtaccacttaaacccagagacaataacaattctctttgtgaaaaccagagcacttgtggacgctttaaaaaattggattgaaggaaatcctaaactcagttttctaaaacctggcatattgactggacgtggcaaaacaaatcagaacacaggaatgaccctcccggcacagaagtgtatattggatgcattcaaagccagtggagatcacaatattctgattgccacctcagttgctgatgaaggcattgacattgcacagtgcaatcttgtcatcctttatgagtatgtgggcaatgtcatcaaaatgatccaaaccagaggcagaggaagagcaagaggtagcaagtgcttccttctgactagtaatgctggtgtaattgaaaaagaacaaataaacatgtacaaagaaaaaatgatgaatgactctattttacgccttcagacatgggacgaagcagtatttagggaaaagattctgcatatacagactcatgaaaaattcatcagagatagtcaagaaaaaccaaaacctgtacctgataaggaaaataaaaaactgctctgcagaaagtgcaaagccttggcatgttacacagctgacgtaagagtgatagaggaatgccattacactgtgcttggagatgcttttaaggaatgctttgtgagtagaccacatcccaagccaaagcagttttcaagttttgaaaaaagagcaaagatattctgtgcccgacagaactgcagccatgactggggaatccatgtgaagtacaagacatttgagattccagttataaaaattgaaagttttgtggtggaggatattgcaactggagttcagacactgtactcgaagtggaaggactttcattttgagaagataccatttgatccagcagaaatgtccaaa

SEQ ID NO: 125 - DNA, 1494 bp, Homo sapiens
  IRF5, transcript variant 2
atgaaccagtccatcccagtggctcccaccccaccccgccgcgtgcggctgaagccctggctggtggcccaggtgaacagctgccagtacccagggcttcaatgggtcaacggggaaaagaaattattctgcatcccctggaggcatgccacaaggcatggtcccagccaggacggagataacaccatcttcaaggcctgggccaaggagacagggaaatacaccgaaggcgtggatgaagccgatccggccaagtggaaggccaacctgcgctgtgcccttaacaagagccgggacttccgcctcatctacgacgggccccgggacatgccacctcagccctacaagatctacgaggtctgctccaatggccctgctcccacagactcccagccccctgaggattactcttttggtgcaggagaggaggaggaagaagaggaagagctgcagaggatgttgccaagcctgagcctcacagaggatgtcaagtggccgcccactctgcagccgcccactctgcggccgcctactctgcagccgcccactctgcagccgcccgtggtgctgggtccccctgctccagaccccagccccctggctcctccccctggcaaccctgctggcttcagggagcttctctctgaggtcctggagcctgggcccctgcctgccagcctgccccctgcaggcgaacagctcctgccagacctgctgatcagcccccacatgctgcctctgaccgacctggagatcaagtttcagtaccgggggcggccaccccgggccctcaccatcagcaacccccatggctgccggctcttctacagccagctggaggccacccaggagcaggtggaactcttcggccccataagcctggagcaagtgcgcttccccagccctgaggacatccccagtgacaagcagcgcttctacacgaaccagctgctggatgtcctggaccgcgggctcatcctccagctacagggccaggacctttatgccatccgcctgtgtcagtgcaaggtgttctggagcgggccttgtgcctcagcccatgactcatgccccaaccccatccagcgggaggtcaagaccaagcttttcagcctggagcattttctcaatgagctcatcctgttccaaaagggccagaccaacaccccaccacccttcgagatcttcttctgctttggggaagaatggcctgaccgcaaaccccgagagaagaagctcattactgtacaggtggtgcctgtagcagctcgactgctgctggagatgttctcaggggagctatcttggtcagctgatagtatccggctacagatctcaaacccagacctcaaagaccgcatggtggagcaattcaaggagctccatcacatctggcagtcccagcagcggttgcagcctgtggcccaggcccctcctggagcaggccttggtgttggccaggggccctggcctatgcacccagctggcatgcaa

SEQ ID NO: 126 - DNA, 1284 bp, Homo sapiens
  IRF3, isoform 1
accatgggaaccccaaagccacggatcctgccctggctggtgtcgcagctggacctggggcaactggagggcgtggcctgggtgaacaagagccgcacgcgcttccgcatcccttggaagcacggcctacggcaggatgcacagcaggaggatttcggaatcttccaggcctgggccgaggccactggtgcatatgttcccgggagggataagccagacctgccaacctggaagaggaatttccgctctgccctcaaccgcaaagaagggttgcgtttagcagaggaccggagcaaggaccctcacgacccacataaaatctacgagtttgtgaactcaggagttggggacttttcccagccagacacctctccggacaccaatggtggaggcagtacttctgatacccaggaagacattctggatgagttactgggtaacatggtgttggccccactcccagatccgggacccccaagcctggctgtagcccctgagccctgccctcagcccctgcggagccccagcttggacaatcccactcccttcccaaacctggggccctctgagaacccactgaagcggctgttggtgccgggggaagagtgggagttcgaggtgacagccttctaccggggccgccaagtcttccagcagaccatctcctgcccggagggcctgcggctggtggggtccgaagtgggagacaggacgctgcctggatggccagtcacactgccagaccctggcatgtccctgacagacaggggagtgatgagctacgtgaggcatgtgctgagctgcctgggtgggggactggctctctggcgggccgggcagtggctctgggcccagcggctggggcactgccacacatactgggcagtgagcgaggagctgctccccaacagcgggcatgggcctgatggcgaggtccccaaggacaaggaaggaggcgtgtttgacctggggcccttcattgtagatctgattaccttcacggaaggaagcggacgctcaccacgctatgccctctggttctgtgtgggggagtcatggccccaggaccagccgtggaccaagaggctcgtgatggtcaaggttgtgcccacgtgcctcagggccttggtagaaatggcccgggtagggggtgcctcctccctggagaatactgtggacctgcacatttccaacagccacccactctccctcacctccgaccagtacaaggcctacctgcaggacttggtggagggcatggatttccagggccctggggagagc

SEQ ID NO: 127 - DNA, 1275 bp, Homo sapiens
  TANK
atggataaaaacattggcgagcaactcaataaagcgtatgaagccttccggcaggcatgcatggatagagattctgcagtaaaagaattacagcaaaagactgagaactatgagcagagaatacgtgaacaacaggaacagctgtcacttcaacagactattattgacaagctaaaatctcagttacttcttgtgaattccactcaagataacaattatggctgtgttcctctgcttgaagacagtgaaacaagaaagaataatttgactcttgatcagccacaagataaagtgatttcaggaatagcaagagaaaaactaccaaaggtaagaagacaagaggtttcttctcctagaaaagaaacttcagcaaggagtcttggcagtcctttgctccatgaaaggggtaatatagagaagactttctgggatctgaaagaagaatttcataaaatatgcatgctagcaaaagcacagaaagaccacttaagcaaacttaatataccagacactgcaactgaaacacagtgctctgtgcctatacagtgtacggataaaacagataaacaagaagcgctgtttaagcctcaggctaaagatgatataaatagaggtgcaccatccatcacatctgtcacaccaagaggactgtgcagagatgaggaagacacctcttttgaatcactttctaaattcaatgtcaagtttccacctatggacaatgactcaactttcttacatagcactccagagagacccggcatccttagtcctgccacgtctgaggcagtgtgccaagagaaatttaatatggagttcagagacaacccagggaactttgttaaaacagaagaaactttatttgaaattcagggaattgaccccatagcttcagctatacaaaaccttaaaacaactgacaaaacaaagccctcaaatctcgtaaacacttgtatcaggacaactctggatagagctgcgtgtttgccacctggagaccataatgcattatatgtaaatagcttcccacttctggacccatctgatgcaccttttccctcactcgattccccgggaaaagcaatccgaggaccacagcagcccatttggaagccctttcctaatcaagacagtgactcggtggtactaagtggcacagactcagaactgcatatacctcgagtatgtgaattctgtcaagcagttttcccaccatccattacatccaggggggatttccttcggcatcttaattcacacttcaatggagagact

SEQ ID NO: 128 - DNA, 2136 bp, Homo sapiens
  TRIF/TICAM1
atggcctgcacaggcccatcacttcctagcgccttcgacattctaggtgcagcaggccaggacaagctcttgtatctgaagcacaaactgaagaccccacgcccaggctgccaggggcaggacctcctgcatgccatggttctcctgaagctgggccaggaaactgaggccaggatctctctagaggcattgaaggccgatgcggtggcccggctggtggcccgccagtgggctggcgtggacagcaccgaggacccagaggagcccccagatgtgtcctgggctgtggcccgcttgtaccacctgctggctgaggagaagctgtgccccgcctcgctgcgggacgtggcctaccaggaagccgtccgcaccctcagctccagggacgaccaccggctgggggaacttcaggatgaggcccgaaaccggtgtgggtgggacattgctggggatccagggagcatccggacgctccagtccaatctgggctgcctcccaccatcctcggctttgccctctgggaccaggagcctcccacgccccattgacggtgtttcggactggagccaagggtgctccctgcgatccactggcagccctgcctccctggccagcaacttggaaatcagccagtcccctaccatgcccttcctcagcctgcaccgcagcccacatgggcccagcaagctctgtgacgacccccaggccagcttggtgcccgagcctgtccccggtggctgccaggagcctgaggagatgagctggccgccatcgggggagattgccagcccaccagagctgccaagcagcccacctcctgggcttcccgaagtggccccagatgcaacctccactggcctccctgatacccccgcagctccagaaaccagcaccaactacccagtggagtgcaccgaggggtctgcaggcccccagtctctccccttgcctattctggagccggtcaaaaacccctgctctgtcaaagaccagacgccactccaactttctgtagaagataccacctctccaaataccaagccgtgcccacctactcccaccaccccagaaacatcccctcctcctcctcctcctcctccttcatctactccttgttcagctcacctgaccccctcctccctgttcccttcctccctggaatcatcatcggaacagaaattctataactttgtgatcctccacgccagggcagacgaacacatcgccctgcgggttcgggagaagctggaggcccttggcgtgcccgacggggccaccttctgcgaggatttccaggtgccggggcgcggggagctgagctgcctgcaggacgccatagaccactcagctttcatcatcctacttctcacctccaacttcgactgtcgcctgagcctgcaccaggtgaaccaagccatgatgagcaacctcacgcgacaggggtcgccagactgtgtcatccccttcctgcccctggagagctccccggcccagctcagctccgacacggccagcctgctctccgggctggtgcggctggacgaacactcccagatcttcgccaggaaggtggccaacaccttcaagccccacaggcttcaggcccgaaaggccatgtggaggaaggaacaggacacccgagccctgcgggaacagagccaacacctggacggtgagcggatgcaggcggcggcactgaacgcagcctactcagcctacctccagagctacttgtcctaccaggcacagatggagcagctccaggtggcttttgggagccacatgtcatttgggactggggcgccctatggggctcgaatgccctttgggggccaggtgcccctgggagccccgccaccctttcccacttggccggggtgcccgcagccgccacccctgcacgcatggcaggctggcacccccccaccgccctccccacagccagcagcctttccacagtcactgcccttcccgcagtccccagccttccctacggcctcacccgcaccccctcagagcccagggctgcaacccctcattatccaccacgcacagatggtacagctggggctgaacaaccacatgtggaaccagagagggtcccaggcgcccgaggacaagacgcaggaggcagaa

SEQ ID NO: 129 - DNA, 381 bp, Homo sapiens
  Batf3
atgtcgcaagggctcccggccgccggcagcgtcctgcagaggagcgtcgcggcgcccgggaaccagccgcagccgcagccgcagcagcagagccctgaggatgatgacaggaaggtccgaaggagagaaaaaaaccgagttgctgctcagagaagtcggaagaagcagacccagaaggctgacaagctccatgaggaatatgagagcctggagcaagaaaacaccatgctgcggagagagatcgggaagctgacagaggagctgaagcacctgacagaggcactgaaggagcacgagaagatgtgcccgctgctgctctgccctatgaactttgtgccagtgcctccccggccggaccctgtggccggctgcttgccccga

SEQ ID NO: 130 - DNA, 459 bp, Homo sapiens
  IL-4, isoform 1
atgggtctcacctcccaactgcttccccctctgttcttcctgctagcatgtgccggcaactttgtccacggacacaagtgcgatatcaccttacaggagatcatcaaaactttgaacagcctcacagagcagaagactctgtgcaccgagttgaccgtaacagacatctttgctgcctccaagaacacaactgagaaggaaaccttctgcagggctgcgactgtgctccggcagttctacagccaccatgagaaggacactcgctgcctgggtgcgactgcacagcagttccacaggcacaagcagctgatccgattcctgaaacggctcgacaggaacctctggggcctggcgggcttgaattcctgtcctgtgaaggaagccaaccagagtacgttggaaaacttcttggaaaggctaaagacgatcatgagagagaaatattcaaagtgttcgagc

SEQ ID NO: 131 - DNA, 534 bp, Homo sapiens
  IL-10
atgcacagctcagcactgctctgttgcctggtcctcctgactggggtgagggccagcccaggccagggcacccagtctgagaacagctgcacccacttcccaggcaacctgcctaacatgcttcgagatctccgagatgccttcagcagagtgaagactttctttcaaatgaaggatcagctggacaacttgttgttaaaggagtccttgctggaggactttaagggttacctgggttgccaagccttgtctgagatgatccagttttacctggaggaggtgatgccccaagctgagaaccaagacccagacatcaaggcgcatgtgaactccctgggggagaacctgaagaccctcaggctgaggctacggcgctgtcatcgatttcttccctgtgaaaacaagagcaaggccgtggagcaggtgaagaatgcctttaataagctccaagagaaaggcatctacaaagccatgagtgagtttgacatcttcatcaactacatagaagcctacatgacaatgaagatacgaaac

SEQ ID NO: 132 - DNA, 759 bp, Homo sapiens
  IL-12 alpha
atgtggccccctgggtcagcctcccagccaccgccctcacctgccgcggccacaggtctgcatccagcggctcgccctgtgtccctgcagtgccggctcagcatgtgtccagcgcgcagcctcctccttgtggctaccctggtcctcctggaccacctcagtttggccagaaacctccccgtggccactccagacccaggaatgttcccatgccttcaccactcccaaaacctgctgagggccgtcagcaacatgctccagaaggccagacaaactctagaattttacccttgcacttctgaagagattgatcatgaagatatcacaaaagataaaaccagcacagtggaggcctgtttaccattggaattaaccaagaatgagagttgcctaaattccagagagacctctttcataactaatgggagttgcctggcctccagaaagacctcttttatgatggccctgtgccttagtagtatttatgaagacttgaagatgtaccaggtggagttcaagaccatgaatgcaaagcttctgatggatcctaagaggcagatctttctagatcaaaacatgctggcagttattgatgagctgatgcaggccctgaatttcaacagtgagactgtgccacaaaaatcctcccttgaagaaccggatttttataaaactaaaatcaagctctgcatacttcttcatgctttcagaattcgggcagtgactattgatagagtgatgagctatctgaatgcttcc

SEQ ID NO: 133 - DNA, 986 bp, Homo sapiens
  IL-12 beta
agatgtgtcaccagcagttggtcatctcttggttttccctggtttttctggcatctcccctcgtggccatatgggaactgaagaaagatgtttatgtcgtagaattggattggtatccggatgcccctggagaaatggtggtcctcacctgtgacacccctgaagaagatggtatcacctggaccttggaccagagcagtgaggtcttaggctctggcaaaaccctgaccatccaagtcaaagagtttggagatgctggccagtacacctgtcacaaaggaggcgaggttctaagccattcgctcctgctgcttcacaaaaaggaagatggaatttggtccactgatattttaaaggaccagaaagaacccaaaaataagacctttctaagatgcgaggccaagaattattctggacgtttcacctgctggtggctgacgacaatcagtactgatttgacattcagtgtcaaaagcagcagaggctcttctgacccccaaggggtgacgtgcggagctgctacactctctgcagagagagtcagaggggacaacaaggagtatgagtactcagtggagtgccaggaggacagtgcctgcccagctgctgaggagagtctgcccattgaggtcatggtggatgccgttcacaagctcaagtatgaaaactacaccagcagcttcttcatcagggacatcatcaaacctgacccacccaagaacttgcagctgaagccattaaagaattctcggcaggtggaggtcagctgggagtaccctgacacctggagtactccacattcctacttctccctgacattctgcgttcaggtccagggcaagagcaagagagaaaagaaagatagagtcttcacggacaagacctcagccacggtcatctgccgcaaaaatgccagcattagcgtgcgggcccaggaccgctactatagctcatcttggagcgaatgggcatctgtgccctgcagt

SEQ ID NO: 134 - DNA, 276 bp, Homo sapiens
  MIP-1 alpha/ CCL3
atgcaggtctccactgctgcccttgctgtcctcctctgcaccatggctctctgcaaccagttctctgcatcacttgctgctgacacgccgaccgcctgctgcttcagctacacctcccggcagattccacagaatttcatagctgactactttgagacgagcagccagtgctccaagcccggtgtcatcttcctaaccaagcgaagccggcaggtctgtgctgaccccagtgaggagtgggtccagaaatatgtcagcgacctggagctgagtgcc

SEQ ID NO: 135 - DNA, 1530 bp, Homo sapiens
  CD39/ENTPD1, isoform 1
atggaagatacaaaggagtctaacgtgaagacattttgctccaagaatatcctagccatccttggcttctcctctatcatagctgtgatagctttgcttgctgtggggttgacccagaacaaagcattgccagaaaacgttaagtatgggattgtgctggatgcgggttcttctcacacaagtttatacatctataagtggccagcagaaaaggagaatgacacaggcgtggtgcatcaagtagaagaatgcagggttaaaggtcctggaatctcaaaatttgttcagaaagtaaatgaaataggcatttacctgactgattgcatggaaagagctagggaagtgattccaaggtcccagcaccaagagacacccgtttacctgggagccacggcaggcatgcggttgctcaggatggaaagtgaagagttggcagacagggttctggatgtggtggagaggagcctcagcaactacccctttgacttccagggtgccaggatcattactggccaagaggaaggtgcctatggctggattactatcaactatctgctgggcaaattcagtcagaaaacaaggtggttcagcatagtcccatatgaaaccaataatcaggaaacctttggagctttggaccttgggggagcctctacacaagtcacttttgtaccccaaaaccagactatcgagtccccagataatgctctgcaatttcgcctctatggcaaggactacaatgtctacacacatagcttcttgtgctatgggaaggatcaggcactctggcagaaactggccaaggacattcaggttgcaagtaatgaaattctcagggacccatgctttcatcctggatataagaaggtagtgaacgtaagtgacctttacaagaccccctgcaccaagagatttgagatgactcttccattccagcagtttgaaatccagggtattggaaactatcaacaatgccatcaaagcatcctggagctcttcaacaccagttactgcccttactcccagtgtgccttcaatgggattttcttgccaccactccagggggattttggggcattttcagctttttactttgtgatgaagtttttaaacttgacatcagagaaagtctctcaggaaaaggtgactgagatgatgaaaaagttctgtgctcagccttgggaggagataaaaacatcttacgctggagtaaaggagaagtacctgagtgaatactgcttttctggtacctacattctctccctccttctgcaaggctatcatttcacagctgattcctgggagcacatccatttcattggcaagatccagggcagcgacgccggctggactttgggctacatgctgaacctgaccaacatgatcccagctgagcaaccattgtccacacctctctcccactccacctatgtcttcctcatggttctattctccctggtccttttcacagtggccatcataggcttgcttatctttcacaagccttcatatttctggaaagatatggta

SEQ ID NO: 136 - DNA, 1722 bp, Homo sapiens
  CD73/NT5E, isoform 1
atgtgtccccgagccgcgcgggcgcccgcgacgctactcctcgccctgggcgcggtgctgtggcctgcggctggcgcctgggagcttacgattttgcacaccaacgacgtgcacagccggctggagcagaccagcgaggactccagcaagtgcgtcaacgccagccgctgcatgggtggcgtggctcggctcttcaccaaggttcagcagatccgccgcgccgaacccaacgtgctgctgctggacgccggcgaccagtaccagggcactatctggttcaccgtgtacaagggcgccgaggtggcgcacttcatgaacgccctgcgctacgatgccatggcactgggaaatcatgaatttgataatggtgtggaaggactgatcgagccactcctcaaagaggccaaatttccaattctgagtgcaaacattaaagcaaaggggccactagcatctcaaatatcaggactttatttgccatataaagttcttcctgttggtgatgaagttgtgggaatcgttggatacacttccaaagaaaccccttttctctcaaatccagggacaaatttagtgtttgaagatgaaatcactgcattacaacctgaagtagataagttaaaaactctaaatgtgaacaaaattattgcactgggacattcgggttttgaaatggataaactcatcgctcagaaagtgaggggtgtggacgtcgtggtgggaggacactccaacacatttctttacacaggcaatccaccttccaaagaggtgcctgctgggaagtacccattcatagtcacttctgatgatgggcggaaggttcctgtagtccaggcctatgcttttggcaaatacctaggctatctgaagatcgagtttgatgaaagaggaaacgtcatctcttcccatggaaatcccattcttctaaacagcagcattcctgaagatccaagcataaaagcagacattaacaaatggaggataaaattggataattattctacccaggaattagggaaaacaattgtctatctggatggctcctctcaatcatgccgctttagagaatgcaacatgggcaacctgatttgtgatgcaatgattaacaacaacctgagacacacggatgaaatgttctggaaccacgtatccatgtgcattttaaatggaggtggtatccggtcgcccattgatgaacgcaacaatggcacaattacctgggagaacctggctgctgtattgccctttggaggcacatttgacctagtccagttaaaaggttccaccctgaagaaggcctttgagcatagcgtgcaccgctacggccagtccactggagagttcctgcaggtgggcggaatccatgtggtgtatgatctttcccgaaaacctggagacagagtagtcaaattagatgttctttgcaccaagtgtcgagtgcccagttatgaccctctcaaaatggacgaggtatataaggtgatcctcccaaacttcctggccaatggtggagatgggttccagatgataaaagatgaattattaagacatgactctggtgaccaagatatcaacgtggtttctacatatatctccaaaatgaaagtaatttatccagcagttgaaggtcggatcaagttttccacaggaagtcactgccatggaagcttttctttaatatttctttcactttgggcagtgatctttgttttataccaa

SEQ ID NO: 137 - DNA, 297 bp, Homo sapiens
  IL-8 (CXCL8)
atgacttccaagctggccgtggctctcttggcagccttcctgatttctgcagctctgtgtgaaggtgcagttttgccaaggagtgctaaagaacttagatgtcagtgcataaagacatactccaaacctttccaccccaaatttatcaaagaactgagagtgattgagagtggaccacactgcgccaacacagaaattattgtaaagctttctgatggaagagagctctgtctggaccccaaggaaaactgggtgcagagggttgtggagaagtttttgaagagggctgagaattca

SEQ ID NO: 138 - DNA, 1596 bp, Homo sapiens
  ICAM1
atggctcccagcagcccccggcccgcgctgcccgcactcctggtcctgctcggggctctgttcccaggacctggcaatgcccagacatctgtgtccccctcaaaagtcatcctgccccggggaggctccgtgctggtgacatgcagcacctcctgtgaccagcccaagttgttgggcatagagaccccgttgcctaaaaaggagttgctcctgcctgggaacaaccggaaggtgtatgaactgagcaatgtgcaagaagatagccaaccaatgtgctattcaaactgccctgatgggcagtcaacagctaaaaccttcctcaccgtgtactggactccagaacgggtggaactggcacccctcccctcttggcagccagtgggcaagaaccttaccctacgctgccaggtggagggtggggcaccccgggccaacctcaccgtggtgctgctccgtggggagaaggagctgaaacgggagccagctgtgggggagcccgctgaggtcacgaccacggtgctggtgaggagagatcaccatggagccaatttctcgtgccgcactgaactggacctgcggccccaagggctggagctgtttgagaacacctcggccccctaccagctccagacctttgtcctgccagcgactcccccacaacttgtcagcccccgggtcctagaggtggacacgcaggggaccgtggtctgttccctggacgggctgttcccagtctcggaggcccaggtccacctggcactgggggaccagaggttgaaccccacagtcacctatggcaacgactccttctcggccaaggcctcagtcagtgtgaccgcagaggacgagggcacccagcggctgacgtgtgcagtaatactggggaaccagagccaggagacactgcagacagtgaccatctacagctttccggcgcccaacgtgattctgacgaagccagaggtctcagaagggaccgaggtgacagtgaagtgtgaggcccaccctagagccaaggtgacgctgaatggggttccagcccagccactgggcccgagggcccagctcctgctgaaggccaccccagaggacaacgggcgcagcttctcctgctctgcaaccctggaggtggccggccagcttatacacaagaaccagacccgggagcttcgtgtcctgtatggcccccgactggacgagagggattgtccgggaaactggacgtggccagaaaattcccagcagactccaatgtgccaggcttgggggaacccattgcccgagctcaagtgtctaaaggatggcactttcccactgcccatcggggaatcagtgactgtcactcgagatcttgagggcacctacctctgtcgggccaggagcactcaaggggaggtcacccgcaaggtgaccgtgaatgtgctctccccccggtatgagattgtcatcatcactgtggtagcagccgcagtcataatgggcactgcaggcctcagcacgtacctctataaccgccagcggaagatcaagaaatacagactacaacaggcccaaaaagggacccccatgaaaccgaacacacaagccacgcctccc

SEQ ID NO: 139 - DNA, 1488 bp, Homo sapiens
  angiopoietin 2, isoform 1
atgtggcagattgttttctttactctgagctgtgatcttgtcttggccgcagcctataacaactttcggaagagcatggacagcataggaaagaagcaatatcaggtccagcatgggtcctgcagctacactttcctcctgccagagatggacaactgccgctcttcctccagcccctacgtgtccaatgctgtgcagagggacgcgccgctcgaatacgatgactcggtgcagaggctgcaagtgctggagaacatcatggaaaacaacactcagtggctaatgaagcttgagaattatatccaggacaacatgaagaaagaaatggtagagatacagcagaatgcagtacagaaccagacggctgtgatgatagaaatagggacaaacctgttgaaccaaacagcggagcaaacgcggaagttaactgatgtggaagcccaagtattaaatcagaccacgagacttgaacttcagctcttggaacactccctctcgacaaacaaattggaaaaacagattttggaccagaccagtgaaataaacaaattgcaagataagaacagtttcctagaaaagaaggtgctagctatggaagacaagcacatcatccaactacagtcaataaaagaagagaaagatcagctacaggtgttagtatccaagcaaaattccatcattgaagaactagaaaaaaaaatagtgactgccacggtgaataattcagttcttcagaagcagcaacatgatctcatggagacagttaataacttactgactatgatgtccacatcaaactcagctaaggaccccactgttgctaaagaagaacaaatcagcttcagagactgtgctgaagtattcaaatcaggacacaccacgaatggcatctacacgttaacattccctaattctacagaagagatcaaggcctactgtgacatggaagctggaggaggcgggtggacaattattcagcgacgtgaggatggcagcgttgattttcagaggacttggaaagaatataaagtgggatttggtaacccttcaggagaatattggctgggaaatgagtttgtttcgcaactgactaatcagcaacgctatgtgcttaaaatacaccttaaagactgggaagggaatgaggcttactcattgtatgaacatttctatctctcaagtgaagaactcaattataggattcaccttaaaggacttacagggacagccggcaaaataagcagcatcagccaaccaggaaatgattttagcacaaaggatggagacaacgacaaatgtatttgcaaatgttcacaaatgctaacaggaggctggtggtttgatgcatgtggtccttccaacttgaacggaatgtactatccacagaggcagaacacaaataagttcaacggcattaaatggtactactggaaaggctcaggctattcgctcaaggccacaaccatgatgatccgaccagcagatttc

SEQ ID NO: 140 - DNA, 2766 bp, Homo sapiens
  NLRP3, isoform 2
atgaagatggcaagcacccgctgcaagctggccaggtacctggaggacctggaggatgtggacttgaagaaatttaagatgcacttagaggactatcctccccagaagggctgcatccccctcccgaggggtcagacagagaaggcagaccatgtggatctagccacgctaatgatcgacttcaatggggaggagaaggcgtgggccatggccgtgtggatcttcgctgcgatcaacaggagagacctttatgagaaagcaaaaagagatgagccgaagtggggttcagataatgcacgtgtttcgaatcccactgtgatatgccaggaagacagcattgaagaggagtggatgggtttactggagtacctttcgagaatctctatttgtaaaatgaagaaagattaccgtaagaagtacagaaagtacgtgagaagcagattccagtgcattgaagacaggaatgcccgtctgggtgagagtgtgagcctcaacaaacgctacacacgactgcgtctcatcaaggagcaccggagccagcaggagagggagcaggagcttctggccatcggcaagaccaagacgtgtgagagccccgtgagtcccattaagatggagttgctgtttgaccccgatgatgagcattctgagcctgtgcacaccgtggtgttccagggggcggcagggattgggaaaacaatcctggccaggaagatgatgttggactgggcgtcggggacactctaccaagacaggtttgactatctgttctatatccactgtcgggaggtgagccttgtgacacagaggagcctgggggacctgatcatgagctgctgccccgacccaaacccacccatccacaagatcgtgagaaaaccctccagaatcctcttcctcatggacggcttcgatgagctgcaaggtgcctttgacgagcacataggaccgctctgcactgactggcagaaggccgagcggggagacattctcctgagcagcctcatcagaaagaagctgcttcccgaggcctctctgctcatcaccacgagacctgtggccctggagaaactgcagcacttgctggaccatcctcggcatgtggagatcctgggtttctccgaggccaaaaggaaagagtacttcttcaagtacttctctgatgaggcccaagccagggcagccttcagtctgattcaggagaacgaggtcctcttcaccatgtgcttcatccccctggtctgctggatcgtgtgcactggactgaaacagcagatggagagtggcaagagccttgcccagacatccaagaccaccaccgcggtgtacgtcttcttcctttccagtttgctgcagccccggggagggagccaggagcacggcctctgcgcccacctctgggggctctgctctttggctgcagatggaatctggaaccagaaaatcctgtttgaggagtccgacctcaggaatcatggactgcagaaggcggatgtgtctgctttcctgaggatgaacctgttccaaaaggaagtggactgcgagaagttctacagcttcatccacatgactttccaggagttctttgccgccatgtactacctgctggaagaggaaaaggaaggaaggacgaacgttccagggagtcgtttgaagcttcccagccgagacgtgacagtccttctggaaaactatggcaaattcgaaaaggggtatttgatttttgttgtacgtttcctctttggcctggtaaaccaggagaggacctcctacttggagaagaaattaagttgcaagatctctcagcaaatcaggctggagctgctgaaatggattgaagtgaaagccaaagctaaaaagctgcagatccagcccagccagctggaattgttctactgtttgtacgagatgcaggaggaggacttcgtgcaaagggccatggactatttccccaagattgagatcaatctctccaccagaatggaccacatggtttcttccttttgcattgagaactgtcatcgggtggagtcactgtccctggggtttctccataacatgcccaaggaggaagaggaggaggaaaaggaaggccgacaccttgatatggtgcagtgtgtcctcccaagctcctctcatgctgcctgttctcatgggttggggcgctgtggcctctcgcatgagtgctgcttcgacatctccttggtcctcagcagcaaccagaagctggtggagctggacctgagtgacaacgccctcggtgacttcggaatcagacttctgtgtgtgggactgaagcacctgttgtgcaatctgaagaagctctggttggtgaattctggccttacgtcagtctgttgttcagctttgtcctcggtactcagcactaatcagaatctcacgcacctttacctgcgaggcaacactctcggagacaaggggatcaaactactctgtgagggactcttgcaccccgactgcaagcttcaggtgttggaattagacaactgcaacctcacgtcacactgctgctgggatctttccacacttctgacctccagccagagcctgcgaaagctgagcctgggcaacaatgacctgggcgacctgggggtcatgatgttctgtgaagtgctgaaacagcagagctgcctcctgcagaacctggggttgtctgaaatgtatttcaattatgagacaaaaagtgcgttagaaacacttcaagaagaaaagcctgagctgaccgtcgtctttgagccttcttgg

SEQ ID NO: 141 - DNA, 831 bp, Homo sapiens
  CD40, isoform 1
atggttcgtctgcctctgcagtgcgtcctctggggctgcttgctgaccgctgtccatccagaaccacccactgcatgcagagaaaaacagtacctaataaacagtcagtgctgttctttgtgccagccaggacagaaactggtgagtgactgcacagagttcactgaaacggaatgccttccttgcggtgaaagcgaattcctagacacctggaacagagagacacactgccaccagcacaaatactgcgaccccaacctagggcttcgggtccagcagaagggcacctcagaaacagacaccatctgcacctgtgaagaaggctggcactgtacgagtgaggcctgtgagagctgtgtcctgcaccgctcatgctcgcccggctttggggtcaagcagattgctacaggggtttctgataccatctgcgagccctgcccagtcggcttcttctccaatgtgtcatctgctttcgaaaaatgtcacccttggacaagctgtgagaccaaagacctggttgtgcaacaggcaggcacaaacaagactgatgttgtctgtggtccccaggatcggctgagagccctggtggtgatccccatcatcttcgggatcctgtttgccatcctcttggtgctggtctttatcaaaaaggtggccaagaagccaaccaataaggccccccaccccaagcaggaaccccaggagatcaattttcccgacgatcttcctggctccaacactgctgctccagtgcaggagactttacatggatgccaaccggtcacccaggaggatggcaaagagagtcgcatctcagtgcaggagagacag

SEQ ID NO: 142 - DNA, 783 bp, Homo sapiens
  CD40 ligand (CD40L)
atgatcgaaacatacaaccaaacttctccccgatctgcggccactggactgcccatcagcatgaaaatttttatgtatttacttactgtttttcttatcacccagatgattgggtcagcactttttgctgtgtatcttcatagaaggttggacaagatagaagatgaaaggaatcttcatgaagattttgtattcatgaaaacgatacagagatgcaacacaggagaaagatccttatccttactgaactgtgaggagattaaaagccagtttgaaggctttgtgaaggatataatgttaaacaaagaggagacgaagaaagaaaacagctttgaaatgcaaaaaggtgatcagaatcctcaaattgcggcacatgtcataagtgaggccagcagtaaaacaacatctgtgttacagtgggctgaaaaaggatactacaccatgagcaacaacttggtaaccctggaaaatgggaaacagctgaccgttaaaagacaaggactctattatatctatgcccaagtcaccttctgttccaatcgggaagcttcgagtcaagctccatttatagccagcctctgcctaaagtcccccggtagattcgagagaatcttactcagagctgcaaatacccacagttccgccaaaccttgcgggcaacaatccattcacttgggaggagtatttgaattgcaaccaggtgcttcggtgtttgtcaatgtgactgatccaagccaagtgagccatggcactggcttcacgtcctttggcttactcaaactc

SEQ ID NO: 143 - DNA, 579 bp, Homo sapiens
  CD-70 antigen, isoform 1
atgccggaggagggttcgggctgctcggtgcggcgcaggccctatgggtgcgtcctgcgggctgctttggtcccattggtcgcgggcttggtgatctgcctcgtggtgtgcatccagcgcttcgcacaggctcagcagcagctgccgctcgagtcacttgggtgggacgtagctgagctgcagctgaatcacacaggacctcagcaggaccccaggctatactggcaggggggcccagcactgggccgctccttcctgcatggaccagagctggacaaggggcagctacgtatccatcgtgatggcatctacatggtacacatccaggtgacgctggccatctgctcctccacgacggcctccaggcaccaccccaccaccctggccgtgggaatctgctctcccgcctcccgtagcatcagcctgctgcgtctcagcttccaccaaggttgtaccattgcctcccagcgcctgacgcccctggcccgaggggacacactctgcaccaacctcactgggacacttttgccttcccgaaacactgatgagaccttctttggagtgcagtgggtgcgcccc

SEQ ID NO: 144 - DNA, 765 bp, Homo sapiens
  CD137 (4-1BB, TNFRSF9)
atgggaaacagctgttacaacatagtagccactctgttgctggtcctcaactttgagaggacaagatcattgcaggatccttgtagtaactgcccagctggtacattctgtgataataacaggaatcagatttgcagtccctgtcctccaaatagtttctccagcgcaggtggacaaaggacctgtgacatatgcaggcagtgtaaaggtgttttcaggaccaggaaggagtgttcctccaccagcaatgcagagtgtgactgcactccagggtttcactgcctgggggcaggatgcagcatgtgtgaacaggattgtaaacaaggtcaagaactgacaaaaaaaggttgtaaagactgttgctttgggacatttaacgatcagaaacgtggcatctgtcgaccctggacaaactgttctttggatggaaagtctgtgcttgtgaatgggacgaaggagagggacgtggtctgtggaccatctccagccgacctctctccgggagcatcctctgtgaccccgcctgcccctgcgagagagccaggacactctccgcagatcatctccttctttcttgcgctgacgtcgactgcgttgctcttcctgctgttcttcctcacgctccgtttctctgttgttaaacggggcagaaagaaactcctgtatatattcaaacaaccatttatgagaccagtacaaactactcaagaggaagatggctgtagctgccgatttccagaagaagaagaaggaggatgtgaactg

SEQ ID NO: 145 - DNA, 807 bp, Homo sapiens
  CD200, isoform 1
atggagaggctggtgatcaggatgcccttctctcatctgtctacctacagcctggtttgggtcatggcagcagtggtgctgtgcacagcacaagtgcaagtggtgacccaggatgaaagagagcagctgtacacacctgcttccttaaaatgctctctgcaaaatgcccaggaagccctcattgtgacatggcagaaaaagaaagctgtaagcccagaaaacatggtcaccttcagcgagaaccatggggtggtgatccagcctgcctataaggacaagataaacattacccagctgggactccaaaactcaaccatcaccttctggaatatcaccctggaggatgaagggtgttacatgtgtctcttcaatacctttggttttgggaagatctcaggaacggcctgcctcaccgtctatgtacagcccatagtatcccttcactacaaattctctgaagaccacctaaatatcacttgctctgccactgcccgcccagcccccatggtcttctggaaggtccctcggtcagggattgaaaatagtacagtgactctgtctcacccaaatgggaccacgtctgttaccagcatcctccatatcaaagaccctaagaatcaggtggggaaggaggtgatctgccaggtgctgcacctggggactgtgaccgactttaagcaaaccgtcaacaaaggctattggttttcagttccgctattgctaagcattgtttccctggtaattcttctcgtcctaatctcaatcttactgtactggaaacgtcaccggaatcaggaccgagagccc

SEQ ID NO: 146 - DNA, 1236 bp, Homo sapiens
  A2aR (ADORA2A)
atgcccatcatgggctcctcggtgtacatcacggtggagctggccattgctgtgctggccatcctgggcaatgtgctggtgtgctgggccgtgtggctcaacagcaacctgcagaacgtcaccaactactttgtggtgtcactggcggcggccgacatcgcagtgggtgtgctcgccatcccctttgccatcaccatcagcaccgggttctgcgctgcctgccacggctgcctcttcattgcctgcttcgtcctggtcctcacgcagagctccatcttcagtctcctggccatcgccattgaccgctacattgccatccgcatcccgctccggtacaatggcttggtgaccggcacgagggctaagggcatcattgccatctgctgggtgctgtcgtttgccatcggcctgactcccatgctaggttggaacaactgcggtcagccaaaggagggcaagaaccactcccagggctgcggggagggccaagtggcctgtctctttgaggatgtggtccccatgaactacatggtgtacttcaacttctttgcctgtgtgctggtgcccctgctgctcatgctgggtgtctatttgcggatcttcctggcggcgcgacgacagctgaagcagatggagagccagcctctgccgggggagcgggcacggtccacactgcagaaggaggtccatgctgccaagtcactggccatcattgtggggctctttgccctctgctggctgcccctacacatcatcaactgcttcactttcttctgccccgactgcagccacgcccctctctggctcatgtacctggccatcgtcctctcccacaccaattcggttgtgaatcccttcatctacgcctaccgtatccgcgagttccgccagaccttccgcaagatcattcgcagccacgtcctgaggcagcaagaacctttcaaggcagctggcaccagtgcccgggtcttggcagctcatggcagtgacggagagcaggtcagcctccgtctcaacggccacccgccaggagtgtgggccaacggcagtgctccccaccctgagcggaggcccaatggctatgccctggggctggtgagtggagggagtgcccaagagtcccaggggaacacgggcctcccagacgtggagctccttagccatgagctcaagggagtgtgcccagagccccctggcctagatgaccccctggcccaggatggagcaggagtgtcc

SEQ ID NO: 147 - DNA, 723 bp, Homo sapiens
  GITR/TNFRSF18, isoform 1
atggcacagcacggggcgatgggcgcgtttcgggccctgtgcggcctggcgctgctgtgcgcgctcagcctgggtcagcgccccaccgggggtcccgggtgcggccctgggcgcctcctgcttgggacgggaacggacgcgcgctgctgccgggttcacacgacgcgctgctgccgcgattacccgggcgaggagtgctgttccgagtgggactgcatgtgtgtccagcctgaattccactgcggagacccttgctgcacgacctgccggcaccacccttgtcccccaggccagggggtacagtcccaggggaaattcagttttggcttccagtgtatcgactgtgcctcggggaccttctccgggggccacgaaggccactgcaaaccttggacagactgcacccagttcgggtttctcactgtgttccctgggaacaagacccacaacgctgtgtgcgtcccagggtccccgccggcagagccgcttgggtggctgaccgtcgtcctcctggccgtggccgcctgcgtcctcctcctgacctcggcccagcttggactgcacatctggcagctgaggagtcagtgcatgtggccccgagagacccagctgctgctggaggtgccgccgtcgaccgaagacgccagaagctgccagttccccgaggaagagcggggcgagcgatcggcagaggagaaggggcggctgggagacctgtgggtg

SEQ ID NO: 148 - DNA, 1362 bp, Homo sapiens
  B7-H6 (NCR3LG1)
atgacgtggagggctgccgcctccacgtgcgcggcgctcctgattctgctgtgggcgctgacgaccgaaggtgatctgaaagtagagatgatggcaggggggactcagatcacacccctgaatgacaatgtcaccatattctgcaatatcttttattcccaacccctcaacatcacgtctatgggtatcacctggttttggaagagtctgacgtttgacaaagaagtcaaagtctttgaattttttggagatcaccaagaggcattccgacctggagccattgtgtctccatggaggctgaagagtggggacgcctcactgcggctgcctggaatccagctggaggaagcaggagagtaccgatgtgaggtggtggtcacccctctgaaggcacagggaacagtccagcttgaagttgtggcttccccagccagcagattgttgctggatcaagtgggcatgaaagagaatgaagacaaatatatgtgtgagtcaagtgggttctacccagaggctattaatataacatgggagaagcagacccagaagtttccccatcccatagagatttctgaggatgtcatcactggtcccaccatcaagaatatggatggcacatttaatgtcactagctgcttgaagctgaactcctctcaggaagaccctgggactgtctaccagtgtgtggtacggcatgcgtccttgcatacccccttgaggagcaactttaccctgactgctgctcggcacagtctttctgaaactgagaagacagataatttttccattcattggtggcctatttcattcattggtgttggactggttttattaattgttttgattccttggaaaaagatatgtaacaaatcatcttcagcctatactcctctcaagtgcattctgaaacactggaactcctttgacactcagactctgaagaaagagcacctcatattcttttgcactcgggcatggccgtcttaccagctgcaggatggggaggcttggcctcctgagggaagtgttaatattaatactattcaacaactagatgttttctgcagacaggagggcaaatggtccgaggttccttatgtgcaagccttctttgccttgcgagacaacccagatctttgtcagtgttgtagaattgaccctgctctcctaacagttacatcaggcaagtccatagatgataattccacaaagtctgagaaacaaacccctagggaacactcggatgcagttccggatgccccaatccttcctgtctcccctatctgggaacctcctccagccacaacatcaacaactccagttctatcctcccaacccccaactttactgttacccctacag

SEQ ID NO: 149 - DNA, 597 bp, Homo sapiens
  ICOS, isoform 1
atgaagtcaggcctctggtatttctttctcttctgcttgcgcattaaagttttaacaggagaaatcaatggttctgccaattatgagatgtttatatttcacaacggaggtgtacaaattttatgcaaatatcctgacattgtccagcaatttaaaatgcagttgctgaaaggggggcaaatactctgcgatctcactaagacaaaaggaagtggaaacacagtgtccattaagagtctgaaattctgccattctcagttatccaacaacagtgtctctttttttctatacaacttggaccattctcatgccaactattacttctgcaacctatcaatttttgatcctcctccttttaaagtaactcttacaggaggatatttgcatatttatgaatcacaactttgttgccagctgaagttctggttacccataggatgtgcagcctttgttgtagtctgcattttgggatgcatacttatttgttggcttacaaaaaagaagtattcatccagtgtgcacgaccctaacggtgaatacatgttcatgagagcagtgaacacagccaaaaaatctagactcacagatgtgacccta

SEQ ID NO: 150 - DNA, 906 bp, Homo sapiens
  ICOS ligand, isoform 1
atgcggctgggcagtcctggactgctcttcctgctcttcagcagccttcgagctgatactcaggagaaggaagtcagagcgatggtaggcagcgacgtggagctcagctgcgcttgccctgaaggaagccgttttgatttaaatgatgtttacgtatattggcaaaccagtgagtcgaaaaccgtggtgacctaccacatcccacagaacagctccttggaaaacgtggacagccgctaccggaaccgagccctgatgtcaccggccggcatgctgcggggcgacttctccctgcgcttgttcaacgtcaccccccaggacgagcagaagtttcactgcctggtgttgagccaatccctgggattccaggaggttttgagcgttgaggttacactgcatgtggcagcaaacttcagcgtgcccgtcgtcagcgccccccacagcccctcccaggatgagctcaccttcacgtgtacatccataaacggctaccccaggcccaacgtgtactggatcaataagacggacaacagcctgctggaccaggctctgcagaatgacaccgtcttcttgaacatgcggggcttgtatgacgtggtcagcgtgctgaggatcgcacggacccccagcgtgaacattggctgctgcatagagaacgtgcttctgcagcagaacctgactgtcggcagccagacaggaaatgacatcggagagagagacaagatcacagagaatccagtcagtaccggcgagaaaaacgcggccacgtggagcatcctggctgtcctgtgcctgcttgtggtcgtggcggtggccataggctgggtgtgcagggaccgatgcctccaacacagctatgcaggtgcctgggctgtgagtccggagacagagctcactggccacgtt

SEQ ID NO: 151 - DNA, 1344 bp, Homo sapiens
  gp49B/LILRB4, isoform 1
atgatccccaccttcacggctctgctctgcctcgggctgagtctgggccccaggacccacatgcaggcagggcccctccccaaacccaccctctgggctgagccaggctctgtgatcagctgggggaactctgtgaccatctggtgtcaggggaccctggaggctcgggagtaccgtctggataaagaggaaagcccagcaccctgggacagacagaacccactggagcccaagaacaaggccagattctccatcccatccatgacagaggactatgcagggagataccgctgttactatcgcagccctgtaggctggtcacagcccagtgaccccctggagctggtgatgacaggagcctacagtaaacccaccctttcagccctgccgagtcctcttgtgacctcaggaaagagcgtgaccctgctgtgtcagtcacggagcccaatggacacttttcttctgatcaaggagcgggcagcccatcccctactgcatctgagatcagagcacggagctcagcagcaccaggctgaattccccatgagtcctgtgacctcagtgcacggggggacctacaggtgcttcagctcacacggcttctcccactacctgctgtcacaccccagtgaccccctggagctcatagtctcaggatccttggagggtcccaggccctcacccacaaggtccgtctcaacagctgcaggccctgaggaccagcccctcatgcctacagggtcagtcccccacagtggtctgagaaggcactgggaggtactgatcggggtcttggtggtctccatcctgcttctctccctcctcctcttcctcctcctccaacactggcgtcagggaaaacacaggacattggcccagagacaggctgatttccaacgtcctccaggggctgccgagccagagcccaaggacgggggcctacagaggaggtccagcccagctgctgacgtccagggagaaaacttctgtgctgccgtgaagaacacacagcctgaggacggggtggaaatggacactcggcagagcccacacgatgaagacccccaggcagtgacgtatgccaaggtgaaacactccagacctaggagagaaatggcctctcctccctccccactgtctggggaattcctggacacaaaggacagacaggcagaagaggacagacagatggacactgaggctgctgcatctgaagccccccaggatgtgacctacgcccggctgcacagctttaccctcagacagaaggcaactgagcctcctccatcccaggaaggggcctctccagctgagcccagtgtctatgccactctggccatccac

SEQ ID NO: 152 - DNA, 1896 bp, Homo sapiens
  PIR-B/LILRB3, isoform 1
atgacgcccgccctcacagccctgctctgccttgggctgagtctgggccccaggacccgcatgcaggcagggcccttccccaaacccaccctctgggctgagccaggctctgtgatcagctgggggagccccgtgaccatctggtgtcaggggagcctggaggcccaggagtaccaactggataaagagggaagcccagagccctgggacagaaataacccactggaacccaagaacaaggccagattctccatcccatccatgacacagcaccatgcagggagataccgctgccactattacagctctgcaggctggtcagagcccagcgaccccctggagctggtgatgacaggattctacaacaaacccaccctctcagccctgcccagccctgtggtggcctcaggggggaatatgaccctccgatgtggctcacagaagggatatcaccattttgttctgatgaaggaaggagaacaccagctcccccggaccctggactcacagcagctccacagtggggggttccaggccctgttccctgtgggccccgtgacccccagccacaggtggaggttcacatgctattactattatacaaacaccccctgggtgtggtcccaccccagtgaccccctggagattctgccctcaggcgtgtctaggaagccctccctcctgaccctgcagggccctgtcctggcccctgggcagagcctgaccctccagtgtggctctgatgtcggctacgacagatttgttctgtataaggagggggaacgtgacttcctccagcgccctggccagcagccccaggctgggctctcccaggccaacttcaccctgggccctgtgagccgctcctacgggggccagtacaggtgctatggtgcacacaacctctcctccgagtggtcggcccccagtgaccccctggacatcctgatcacaggacagatctatgacaccgtctccctgtcagcacagccgggccccacagtggcctcaggagagaacatgaccctgctgtgtcagtcacgggggtattttgacactttccttctgaccaaagaaggggcagcccatcccccactgcgtctgagatcaatgtacggagctcataagtaccaggctgaattccccatgagtcctgtgacctcagcccacgcggggacctacaggtgctacggctcacgcagctccaacccccacctgctgtctttccccagtgagcccctggaactcatggtctcaggacactctggaggctccagcctcccacccacagggccgccctccacacctggtctgggaagatacctggaggttttgattggggtctcggtggccttcgtcctgctgctcttcctcctcctcttcctcctcctcctccgtcagcgtcacagcaaacacaggacatctgaccagagaaagactgatttccagcgtcctgcaggggctgcggagacagagcccaaggacaggggcctgctgaggaggtccagcccagctgctgacgtccaggaagaaaacctctatgctgctgtgaaggacacacagtctgaggacagggtggagctggacagtcagcagagcccacacgatgaagacccccaggcagtgacgtatgccccggtgaaacactccagtcctaggagagaaatggcctctcctccctcctcactgtctggggaattcctggacacaaaggacagacaggtggaagaggacaggcagatggacactgaggctgctgcatctgaagcctcccaggatgtgacctacgcccagctgcacagcttgacccttagacggaaggcaactgagcctcctccatcccaggaaggggaacctccagctgagcccagcatctacgccactctggccatccac

SEQ ID NO: 153 - DNA, 1014 bp, Homo sapiens
  HLA-G alpha chain
atggtggtcatggcgccccgaaccctcttcctgctgctctcgggggccctgaccctgaccgagacctgggcgggctcccactccatgaggtatttcagcgccgccgtgtcccggcccggccgcggggagccccgcttcatcgccatgggctacgtggacgacacgcagttcgtgcggttcgacagcgactcggcgtgtccgaggatggagccgcgggcgccgtgggtggagcaggaggggccggagtattgggaagaggagacacggaacaccaaggcccacgcacagactgacagaatgaacctgcagaccctgcgcggctactacaaccagagcgaggccagttctcacaccctccagtggatgattggctgcgacctggggtccgacggacgcctcctccgcgggtatgaacagtatgcctacgatggcaaggattacctcgccctgaacgaggacctgcgctcctggaccgcagcggacactgcggctcagatctccaagcgcaagtgtgaggcggccaatgtggctgaacaaaggagagcctacctggagggcacgtgcgtggagtggctccacagatacctggagaacgggaaggagatgctgcagcgcgcggacccccccaagacacacgtgacccaccaccctgtctttgactatgaggccaccctgaggtgctgggccctgggcttctaccctgcggagatcatactgacctggcagcgggatggggaggaccagacccaggacgtggagctcgtggagaccaggcctgcaggggatggaaccttccagaagtgggcagctgtggtggtgccttctggagaggagcagagatacacgtgccatgtgcagcatgaggggctgccggagcccctcatgctgagatggaagcagtcttccctgcccaccatccccatcatgggtatcgttgctggcctggttgtccttgcagctgtagtcactggagctgcggtcgctgctgtgctgtggagaaagaagagctcagat

SEQ ID NO: 154 - DNA, 1092 bp, Homo sapiens
  TIM1/HAVCR1
atgcatcctcaagtggtcatcttaagcctcatcctacatctggcagattctgtagctggttctgtaaaggttggtggagaggcaggtccatctgtcacactaccctgccactacagtggagctgtcacatccatgtgctggaatagaggctcatgttctctattcacatgccaaaatggcattgtctggaccaatggaacccacgtcacctatcggaaggacacacgctataagctattgggggacctttcaagaagggatgtctctttgaccatagaaaatacagctgtgtctgacagtggcgtatattgttgccgtgttgagcaccgtgggtggttcaatgacatgaaaatcaccgtatcattggagattgtgccacccaaggtcacgactactccaattgtcacaactgttccaaccgtcacgactgttcgaacgagcaccactgttccaacgacaacgactgttccaatgacgactgttccaacgacaactgttccaacaacaatgagcattccaacgacaacgactgttctgacgacaatgactgtttcaacgacaacgagcgttccaacgacaacgagcattccaacaacaacaagtgttccagtgacaacaactgtctctacctttgttcctccaatgcctttgcccaggcagaaccatgaaccagtagccacttcaccatcttcacctcagccagcagaaacccaccctacgacactgcagggagcaataaggagagaacccaccagctcaccattgtactcttacacaacagatgggaatgacaccgtgacagagtcttcagatggcctttggaataacaatcaaactcaactgttcctagaacatagtctactgacggccaataccactaaaggaatctatgctggagtctgtatttctgtcttggtgcttcttgctcttttgggtgtcatcattgccaaaaagtatttcttcaaaaaggaggttcaacaactaagtgtttcatttagcagccttcaaattaaagctttgcaaaatgcagttgaaaaggaagtccaagcagaagacaatatctacattgagaatagtctttatgccacggac

SEQ ID NO: 155 - DNA, 1134 bp, Homo sapiens
  TIM4/TIMD4, isoform 1
atgtccaaagaacctctcattctctggctgatgattgagttttggtggctttacctgacaccagtcacttcagagactgttgtgacggaggttttgggtcaccgggtgactttgccctgtctgtactcatcctggtctcacaacagcaacagcatgtgctgggggaaagaccagtgcccctactccggttgcaaggaggcgctcatccgcactgatggaatgagggtgacctcaagaaagtcagcaaaatatagacttcaggggactatcccgagaggtgatgtctccttgaccatcttaaaccccagtgaaagtgacagcggtgtgtactgctgccgcatagaagtgcctggctggttcaacgatgtaaagataaacgtgcgcctgaatctacagagagcctcaacaaccacgcacagaacagcaaccaccaccacacgcagaacaacaacaacaagccccaccaccacccgacaaatgacaacaaccccagctgcacttccaacaacagtcgtgaccacacccgatctcacaaccggaacaccactccagatgacaaccattgccgtcttcacaacagcaaacacgtgcctttcactaaccccaagcacccttccggaggaagccacaggtcttctgactcccgagccttctaaggaagggcccatcctcactgcagaatcagaaactgtcctccccagtgattcctggagtagtgttgagtctacttctgctgacactgtcctgctgacatccaaagagtccaaagtttgggatctcccatcaacatcccacgtgtcaatgtggaaaacgagtgattctgtgtcttctcctcagcctggagcatctgatacagcagttcctgagcagaacaaaacaacaaaaacaggacagatggatggaatacccatgtcaatgaagaatgaaatgcccatctcccaactactgatgatcatcgccccctccttgggatttgtgctcttcgcattgtttgtggcgtttctcctgagagggaaactcatggaaacctattgttcgcagaaacacacaaggctagactacattggagatagtaaaaatgtcctcaatgacgtgcagcatggaagggaagacgaagacggcctttttaccctc

SEQ ID NO: 156 - DNA, 831 bp, Homo sapiens
  OX-40/CD134/TNFRSF4
atgtgcgtgggggctcggcggctgggccgcgggccgtgtgcggctctgctcctcctgggcctggggctgagcaccgtgacggggctccactgtgtcggggacacctaccccagcaacgaccggtgctgccacgagtgcaggccaggcaacgggatggtgagccgctgcagccgctcccagaacacggtgtgccgtccgtgcgggccgggcttctacaacgacgtggtcagctccaagccgtgcaagccctgcacgtggtgtaacctcagaagtgggagtgagcggaagcagctgtgcacggccacacaggacacagtctgccgctgccgggcgggcacccagcccctggacagctacaagcctggagttgactgtgccccctgccctccagggcacttctccccaggcgacaaccaggcctgcaagccctggaccaactgcaccttggctgggaagcacaccctgcagccggccagcaatagctcggacgcaatctgtgaggacagggaccccccagccacgcagccccaggagacccagggccccccggccaggcccatcactgtccagcccactgaagcctggcccagaacctcacagggaccctccacccggcccgtggaggtccccgggggccgtgcggttgccgccatcctgggcctgggcctggtgctggggctgctgggccccctggccatcctgctggccctgtacctgctccggagggaccagaggctgccccccgatgcccacaagccccctgggggaggcagtttccggacccccatccaagaggagcaggccgacgcccactccaccctggccaagatc

SEQ ID NO: 157 - DNA, 549 bp, Homo sapiens
  OX-40L/CD252/TNFSF4, isoform 1
atggaaagggtccaacccctggaagagaatgtgggaaatgcagccaggccaagattcgagaggaacaagctattgctggtggcctctgtaattcagggactggggctgctcctgtgcttcacctacatctgcctgcacttctctgctcttcaggtatcacatcggtatcctcgaattcaaagtatcaaagtacaatttaccgaatataagaaggagaaaggtttcatcctcacttcccaaaaggaggatgaaatcatgaaggtgcagaacaactcagtcatcatcaactgtgatgggttttatctcatctccctgaagggctacttctcccaggaagtcaacattagccttcattaccagaaggatgaggagcccctcttccaactgaagaaggtcaggtctgtcaactccttgatggtggcctctctgacttacaaagacaaagtctacttgaatgtgaccactgacaatacctccctggatgacttccatgtgaatggcggagaactgattcttatccatcaaaatcctggtgaattctgtgtcctt

SEQ ID NO: 158 - DNA, 1950 bp, Homo sapiens
  ILT-2/LILRB1, isoform 1
atgacccccatcctcacggtcctgatctgtctcgggctgagtctgggcccccggacccacgtgcaggcagggcacctccccaagcccaccctctgggctgaaccaggctctgtgatcacccaggggagtcctgtgaccctcaggtgtcaggggggccaggagacccaggagtaccgtctatatagagaaaagaaaacagcaccctggattacacggatcccacaggagcttgtgaagaagggccagttccccatcccatccatcacctgggaacacacagggcggtatcgctgttactatggtagcgacactgcaggccgctcagagagcagtgaccccctggagctggtggtgacaggagcctacatcaaacccaccctctcagcccagcccagccccgtggtgaactcaggagggaatgtaaccctccagtgtgactcacaggtggcatttgatggcttcattctgtgtaaggaaggagaagatgaacacccacaatgcctgaactcccagccccatgcccgtgggtcgtcccgcgccatcttctccgtgggccccgtgagcccgagtcgcaggtggtggtacaggtgctatgcttatgactcgaactctccctatgagtggtctctacccagtgatctcctggagctcctggtcctaggtgtttctaagaagccatcactctcagtgcagccaggtcctatcgtggcccctgaggagaccctgactctgcagtgtggctctgatgctggctacaacagatttgttctgtataaggacggggaacgtgacttccttcagctcgctggcgcacagccccaggctgggctctcccaggccaacttcaccctgggccctgtgagccgctcctacgggggccagtacagatgctacggtgcacacaacctctcctccgagtggtcggcccccagcgaccccctggacatcctgatcgcaggacagttctatgacagagtctccctctcggtgcagccgggccccacggtggcctcaggagagaacgtgaccctgctgtgtcagtcacagggatggatgcaaactttccttctgaccaaggagggggcagctgatgacccatggcgtctaagatcaacgtaccaatctcaaaaataccaggctgaattccccatgggtcctgtgacctcagcccatgcggggacctacaggtgctacggctcacagagctccaaaccctacctgctgactcaccccagtgaccccctggagctcgtggtctcaggaccgtctgggggccccagctccccgacaacaggccccacctccacatctggccctgaggaccagcccctcacccccaccgggtcggatccccagagtggtctgggaaggcacctgggggttgtgatcggcatcttggtggccgtcatcctactgctcctcctcctcctcctcctcttcctcatcctccgacatcgacgtcagggcaaacactggacatcgacccagagaaaggctgatttccaacatcctgcaggggctgtggggccagagcccacagacagaggcctgcagtggaggtccagcccagctgccgatgcccaggaagaaaacctctatgctgccgtgaagcacacacagcctgaggatggggtggagatggacactcggagcccacacgatgaagacccccaggcagtgacgtatgccgaggtgaaacactccagacctaggagagaaatggcctctcctccttccccactgtctggggaattcctggacacaaaggacagacaggcggaagaggacaggcagatggacactgaggctgctgcatctgaagccccccaggatgtgacctacgcccagctgcacagcttgaccctcagacgggaggcaactgagcctcctccatcccaggaagggccctctccagctgtgcccagcatctacgccactctggccatccac

SEQ ID NO: 159 - DNA, 1794 bp, Homo sapiens
  ILT-4/LILRB2, isoform 1
atgacccccatcgtcacagtcctgatctgtctcgggctgagtctgggccccaggacccgcgtgcagacagggaccatccccaagcccaccctgtgggctgagccagactctgtgatcacccaggggagtcccgtcaccctcagttgtcaggggagccttgaagcccaggagtaccgtctatatagggagaaaaaatcagcatcttggattacacggatacgaccagagcttgtgaagaacggccagttccacatcccatccatcacctgggaacacacagggcgatatggctgtcagtattacagccgcgctcggtggtctgagctcagtgaccccctggtgctggtgatgacaggagcctacccaaaacccaccctctcagcccagcccagccctgtggtgacctcaggaggaagggtgaccctccagtgtgagtcacaggtggcatttggcggcttcattctgtgtaaggaaggagaagatgaacacccacaatgcctgaactcccagccccatgcccgtgggtcgtcccgcgccatcttctccgtgggccccgtgagcccgaatcgcaggtggtcgcacaggtgctatggttatgacttgaactctccctatgtgtggtcttcacccagtgatctcctggagctcctggtcccaggtgtttctaagaagccatcactctcagtgcagccgggtcctgtcatggcccctggggaaagcctgaccctccagtgtgtctctgatgtcggctatgacagatttgttctgtacaaggagggggaacgtgaccttcgccagctccctggccggcagccccaggctgggctctcccaggccaacttcaccctgggccctgtgagccgctcctacgggggccagtacagatgctacggtgcacacaacctctcctctgagtgctcggcccccagcgaccccctggacatcctgatcacaggacagatccgtggcacacccttcatctcagtgcagccaggccccacagtggcctcaggagagaacgtgaccctgctgtgtcagtcatggcggcagttccacactttccttctgaccaaggcgggagcagctgatgccccactccgtctaagatcaatacacgaatatcctaagtaccaggctgaattccccatgagtcctgtgacctcagcccacgcggggacctacaggtgctacggctcactcaactccgacccctacctgctgtctcaccccagtgagcccctggagctcgtggtctcaggaccctccatgggttccagccccccacccaccggtcccatctccacacctgcaggccctgaggaccagcccctcacccccactgggtcggatccccaaagtggtctgggaaggcacctgggggttgtgatcggcatcttggtggccgtcgtcctactgctcctcctcctcctcctcctcttcctcatcctccgacatcgacgtcagggcaaacactggacatcgacccagagaaaggctgatttccaacatcctgcaggggctgtggggccagagcccacagacagaggcctgcagtggaggtccagcccagctgccgacgcccaggaagaaaacctctatgctgccgtgaaggacacacagcctgaagatggggtggagatggacactcgggctgctgcatctgaagccccccaggatgtgacctacgcccagctgcacagcttgaccctcagacggaaggcaactgagcctcctccatcccaggaaagggaacctccagctgagcccagcatctacgccaccctggccatccac

SEQ ID NO: 160 - DNA, 717 bp, Homo sapiens
  BCL-2 isoform alpha
atggcgcacgctgggagaacagggtacgataaccgggagatagtgatgaagtacatccattataagctgtcgcagaggggctacgagtgggatgcgggagatgtgggcgccgcgcccccgggggccgcccccgcaccgggcatcttctcctcccagcccgggcacacgccccatccagccgcatcccgggacccggtcgccaggacctcgccgctgcagaccccggctgcccccggcgccgccgcggggcctgcgctcagcccggtgccacctgtggtccacctgaccctccgccaggccggcgacgacttctcccgccgctaccgccgcgacttcgccgagatgtccagccagctgcacctgacgcccttcaccgcgcggggacgctttgccacggtggtggaggagctcttcagggacggggtgaactgggggaggattgtggccttctttgagttcggtggggtcatgtgtgtggagagcgtcaaccgggagatgtcgcccctggtggacaacatcgccctgtggatgactgagtacctgaaccggcacctgcacacctggatccaggataacggaggctgggatgcctttgtggaactgtacggccccagcatgcggcctctgtttgatttctcctggctgtctctgaagactctgctcagtttggccctggtgggagcttgcatcaccctgggtgcctatctgggccacaag

SEQ ID NO: 161 - DNA, 4050 bp, Homo sapiens
  MDR1/ABCB1, isoform 1
atgagtgtcaacttgcaaggggaccagagaggtgcaacggaagccagaacattcctcctggaaattcaacctgtttcgcagtttctcgaggaatcagcattcagtcaatccgggccgggagcagtcatctgtggtctttccactaaagtcggagtatcttcttccaaaatttcacgtcttggtggccgttccaaggagcgcgaggtcggaatggatcttgaaggggaccgcaatggaggagcaaagaagaagaacttttttaaactgaacaataaaagtgaaaaagataagaaggaaaagaaaccaactgtcagtgtattttcaatgtttcgctattcaaattggcttgacaagttgtatatggtggtgggaactttggctgccatcatccatggggctggacttcctctcatgatgctggtgtttggagaaatgacagatatctttgcaaatgcaggaaatttagaagatctgatgtcaaacatcactaatagaagtgatatcaatgatacagggttcttcatgaatctggaggaagacatgaccaggtatgcctattattacagtggaattggtgctggggtgctggttgctgcttacattcaggtttcattttggtgcctggcagctggaagacaaatacacaaaattagaaaacagttttttcatgctataatgcgacaggagataggctggtttgatgtgcacgatgttggggagcttaacacccgacttacagatgatgtctccaagattaatgaaggaattggtgacaaaattggaatgttctttcagtcaatggcaacatttttcactgggtttatagtaggatttacacgtggttggaagctaacccttgtgattttggccatcagtcctgttcttggactgtcagctgctgtctgggcaaagatactatcttcatttactgataaagaactcttagcgtatgcaaaagctggagcagtagctgaagaggtcttggcagcaattagaactgtgattgcatttggaggacaaaagaaagaacttgaaaggtacaacaaaaatttagaagaagctaaaagaattgggataaagaaagctattacagccaatatttctataggtgctgctttcctgctgatctatgcatcttatgctctggccttctggtatgggaccaccttggtcctctcaggggaatattctattggacaagtactcactgtattcttttctgtattaattggggcttttagtgttggacaggcatctccaagcattgaagcatttgcaaatgcaagaggagcagcttatgaaatcttcaagataattgataataagccaagtattgacagctattcgaagagtgggcacaaaccagataatattaagggaaatttggaattcagaaatgttcacttcagttacccatctcgaaaagaagttaagatcttgaagggtctgaacctgaaggtgcagagtgggcagacggtggccctggttggaaacagtggctgtgggaagagcacaacagtccagctgatgcagaggctctatgaccccacagaggggatggtcagtgttgatggacaggatattaggaccataaatgtaaggtttctacgggaaatcattggtgtggtgagtcaggaacctgtattgtttgccaccacgatagctgaaaacattcgctatggccgtgaaaatgtcaccatggatgagattgagaaagctgtcaaggaagccaatgcctatgactttatcatgaaactgcctcataaatttgacaccctggttggagagagaggggcccagttgagtggtgggcagaagcagaggatcgccattgcacgtgccctggttcgcaaccccaagatcctcctgctggatgaggccacgtcagccttggacacagaaagcgaagcagtggttcaggtggctctggataaggccagaaaaggtcggaccaccattgtgatagctcatcgtttgtctacagttcgtaatgctgacgtcatcgctggtttcgatgatggagtcattgtggagaaaggaaatcatgatgaactcatgaaagagaaaggcatttacttcaaacttgtcacaatgcagacagcaggaaatgaagttgaattagaaaatgcagctgatgaatccaaaagtgaaattgatgccttggaaatgtcttcaaatgattcaagatccagtctaataagaaaaagatcaactcgtaggagtgtccgtggatcacaagcccaagacagaaagcttagtaccaaagaggctctggatgaaagtatacctccagtttccttttggaggattatgaagctaaatttaactgaatggccttattttgttgttggtgtattttgtgccattataaatggaggcctgcaaccagcatttgcaataatattttcaaagattataggggtttttacaagaattgatgatcctgaaacaaaacgacagaatagtaacttgttttcactattgtttctagcccttggaattatttcttttattacatttttccttcagggtttcacatttggcaaagctggagagatcctcaccaagcggctccgatacatggttttccgatccatgctcagacaggatgtgagttggtttgatgaccctaaaaacaccactggagcattgactaccaggctcgccaatgatgctgctcaagttaaaggggctataggttccaggcttgctgtaattacccagaatatagcaaatcttgggacaggaataattatatccttcatctatggttggcaactaacactgttactcttagcaattgtacccatcattgcaatagcaggagttgttgaaatgaaaatgttgtctggacaagcactgaaagataagaaagaactagaaggttctgggaagatcgctactgaagcaatagaaaacttccgaaccgttgtttctttgactcaggagcagaagtttgaacatatgtatgctcagagtttgcaggtaccatacagaaactctttgaggaaagcacacatctttggaattacattttccttcacccaggcaatgatgtatttttcctatgctggatgtttccggtttggagcctacttggtggcacataaactcatgagctttgaggatgttctgttagtattttcagctgttgtctttggtgccatggccgtggggcaagtcagttcatttgctcctgactatgccaaagccaaaatatcagcagcccacatcatcatgatcattgaaaaaacccctttgattgacagctacagcacggaaggcctaatgccgaacacattggaaggaaatgtcacatttggtgaagttgtattcaactatcccacccgaccggacatcccagtgcttcagggactgagcctggaggtgaagaagggccagacgctggctctggtgggcagcagtggctgtgggaagagcacagtggtccagctcctggagcggttctacgaccccttggcagggaaagtgctgcttgatggcaaagaaataaagcgactgaatgttcagtggctccgagcacacctgggcatcgtgtcccaggagcccatcctgtttgactgcagcattgctgagaacattgcctatggagacaacagccgggtggtgtcacaggaagagattgtgagggcagcaaaggaggccaacatacatgccttcatcgagtcactgcctaataaatatagcactaaagtaggagacaaaggaactcagctctctggtggccagaaacaacgcattgccatagctcgtgcccttgttagacagcctcatattttgcttttggatgaagccacgtcagctctggatacagaaagtgaaaaggttgtccaagaagccctggacaaagccagagaaggccgcacctgcattgtgattgctcaccgcctgtccaccatccagaatgcagacttaatagtggtgtttcagaatggcagagtcaaggagcatggcacgcatcagcagctgctggcacagaaaggcatctatttttcaatggtcagtgtccaggctggaacaaagcgccag

SEQ ID NO: 162 - DNA, 990 bp, Homo sapiens
  Arginase1, isoform 1
atgagcgccaagtccagaaccatagggattattggagctcctttctcaaagggacagccacgaggaggggtggaagaaggccctacagtattgagaaaggctggtctgcttgagaaacttaaagaacaagtaactcaaaactttttaattttagagtgtgatgtgaaggattatggggacctgccctttgctgacatccctaatgacagtccctttcaaattgtgaagaatccaaggtctgtgggaaaagcaagcgagcagctggctggcaaggtggcagaagtcaagaagaacggaagaatcagcctggtgctgggcggagaccacagtttggcaattggaagcatctctggccatgccagggtccaccctgatcttggagtcatctgggtggatgctcacactgatatcaacactccactgacaaccacaagtggaaacttgcatggacaacctgtatctttcctcctgaaggaactaaaaggaaagattcccgatgtgccaggattctcctgggtgactccctgtatatctgccaaggatattgtgtatattggcttgagagacgtggaccctggggaacactacattttgaaaactctaggcattaaatacttttcaatgactgaagtggacagactaggaattggcaaggtgatggaagaaacactcagctatctactaggaagaaagaaaaggccaattcatctaagttttgatgttgacggactggacccatctttcacaccagctactggcacaccagtcgtgggaggtctgacatacagagaaggtctctacatcacagaagaaatctacaaaacagggctactctcaggattagatataatggaagtgaacccatccctggggaagacaccagaagaagtaactcgaacagtgaacacagcagttgcaataaccttggcttgtttcggacttgctcgggagggtaatcacaagcctattgactaccttaacccacctaag

SEQ ID NO: 163 - DNA, 3459 bp, Homo sapiens
  nitric oxide synthase, inducible (iNOS/NOS2), isoform 1
atggcctgtccttggaaatttctgttcaagaccaaattccaccagtatgcaatgaatggggaaaaagacatcaacaacaatgtggagaaagccccctgtgccacctccagtccagtgacacaggatgaccttcagtatcacaacctcagcaagcagcagaatgagtccccgcagcccctcgtggagacgggaaagaagtctccagaatctctggtcaagctggatgcaaccccattgtcctccccacggcatgtgaggatcaaaaactggggcagcgggatgactttccaagacacacttcaccataaggccaaagggattttaacttgcaggtccaaatcttgcctggggtccattatgactcccaaaagtttgaccagaggacccagggacaagcctacccctccagatgagcttctacctcaagctatcgaatttgtcaaccaatattacggctccttcaaagaggcaaaaatagaggaacatctggccagggtggaagcggtaacaaaggagatagaaacaacaggaacctaccaactgacgggagatgagctcatcttcgccaccaagcaggcctggcgcaatgccccacgctgcattgggaggatccagtggtccaacctgcaggtcttcgatgcccgcagctgttccactgcccgggaaatgtttgaacacatctgcagacacgtgcgttactccaccaacaatggcaacatcaggtcggccatcaccgtgttcccccagcggagtgatggcaagcacgacttccgggtgtggaatgctcagctcatccgctatgctggctaccagatgccagatggcagcatcagaggggaccctgccaacgtggaattcactcagctgtgcatcgacctgggctggaagcccaagtacggccgcttcgatgtggtccccctggtcctgcaggccaatggccgtgaccctgagctcttcgaaatcccacctgaccttgtgcttgaggtggccatggaacatcccaaatacgagtggtttcgggaactggagctaaagtggtacgccctgcctgcagtggccaacatgctgcttgaggtgggcggcctggagttcccagggtgccccttcaatggctggtacatgggcacagagatcggagtccgggacttctgtgacgtccagcgctacaacatcctggaggaagtgggcaggagaatgggcctggaaacgcacaagctggcctcgctctggaaagaccaggctgtcgttgagatcaacattgctgtgctccatagtttccagaagcagaatgtgaccatcatggaccaccactcggctgcagaatccttcatgaagtacatgcagaatgaataccggtcccgtgggggctgcccggcagactggatttggctggtccctcccatgtctgggagcatcacccccgtgtttcaccaggagatgctgaactacgtcctgtcccctttctactactatcaggtagaggcctggaaaacccatgtctggcaggacgagaagcggagacccaagagaagagagattccattgaaagtcttggtcaaagctgtgctctttgcctgtatgctgatgcgcaagacaatggcgtcccgagtcagagtcaccatcctctttgcgacagagacaggaaaatcagaggcgctggcctgggacctgggggccttattcagctgtgccttcaaccccaaggttgtctgcatggataagtacaggctgagctgcctggaggaggaacggctgctgttggtggtgaccagtacgtttggcaatggagactgccctggcaatggagagaaactgaagaaatcgctcttcatgctgaaagagctcaacaacaaattcaggtacgctgtgtttggcctcggctccagcatgtaccctcggttctgcgcctttgctcatgacattgatcagaagctgtcccacctgggggcctctcagctcaccccgatgggagaaggggatgagctcagtgggcaggaggacgccttccgcagctgggccgtgcaaaccttcaaggcagcctgtgagacgtttgatgtccgaggcaaacagcacattcagatccccaagctctacacctccaatgtgacctgggacccgcaccactacaggctcgtgcaggactcacagcctttggacctcagcaaagccctcagcagcatgcatgccaagaacgtgttcaccatgaggctcaaatctcggcagaatctacaaagtccgacatccagccgtgccaccatcctggtggaactctcctgtgaggatggccaaggcctgaactacctgccgggggagcaccttggggtttgcccaggcaaccagccggccctggtccaaggtatcctggagcgagtggtggatggccccacaccccaccagacagtgcgcctggaggccctggatgagagtggcagctactgggtcagtgacaagaggctgcccccctgctcactcagccaggccctcacctacttcctggacatcaccacacccccaacccagctgctgctccaaaagctggcccaggtggccacagaagagcctgagagacagaggctggaggccctgtgccagccctcagagtacagcaagtggaagttcaccaacagccccacattcctggaggtgctagaggagttcccgtccctgcgggtgtctgctggcttcctgctttcccagctccccattctgaagcccaggttctactccatcagctcctcccgggatcacacgcccacagagatccacctgactgtggccgtggtcacctaccacacccgagatggccagggtcccctgcaccacggcgtctgcagcacatggctcaacagcctgaagccccaagacccagtgccctgctttgtgcggaatgccagcggcttccacctccccgaggatccctcccatccttgcatcctcatcgggcctggcacaggcatcgcgcccttccgcagtttctggcagcaacggctccatgactcccagcacaagggagtgcggggaggccgcatgaccttggtgtttgggtgccgccgcccagatgaggaccacatctaccaggaggagatgctggagatggcccagaagggggtgctgcatgcggtgcacacagcctattcccgcctgcctggcaagcccaaggtctatgttcaggacatcctgcggcagcagctggccagcgaggtgctccgtgtgctccacaaggagccaggccacctctatgtttgcggggatgtgcgcatggcccgggacgtggcccacaccctgaagcagctggtggctgccaagctgaaattgaatgaggagcaggtcgaggactatttctttcagctcaagagccagaagcgctatcacgaagatatctttggtgctgtatttccttacgaggcgaagaaggacagggtggcggtgcagcccagcagcctggagatgtcagcgctc

SEQ ID NO: 164 - DNA, 3765 bp, Homo sapiens
  Her2
atggagctggcggccttgtgccgctgggggctcctcctcgccctcttgccccccggagccgcgagcacccaagtgtgcaccggcacagacatgaagctgcggctccctgccagtcccgagacccacctggacatgctccgccacctctaccagggctgccaggtggtgcagggaaacctggaactcacctacctgcccaccaatgccagcctgtccttcctgcaggatatccaggaggtgcagggctacgtgctcatcgctcacaaccaagtgaggcaggtcccactgcagaggctgcggattgtgcgaggcacccagctctttgaggacaactatgccctggccgtgctagacaatggagacccgctgaacaataccacccctgtcacaggggcctccccaggaggcctgcgggagctgcagcttcgaagcctcacagagatcttgaaaggaggggtcttgatccagcggaacccccagctctgctaccaggacacgattttgtggaaggacatcttccacaagaacaaccagctggctctcacactgatagacaccaaccgctctcgggcctgccacccctgttctccgatgtgtaagggctcccgctgctggggagagagttctgaggattgtcagagcctgacgcgcactgtctgtgccggtggctgtgcccgctgcaaggggccactgcccactgactgctgccatgagcagtgtgctgccggctgcacgggccccaagcactctgactgcctggcctgcctccacttcaaccacagtggcatctgtgagctgcactgcccagccctggtcacctacaacacagacacgtttgagtccatgcccaatcccgagggccggtatacattcggcgccagctgtgtgactgcctgtccctacaactacctttctacggacgtgggatcctgcaccctcgtctgccccctgcacaaccaagaggtgacagcagaggatggaacacagcggtgtgagaagtgcagcaagccctgtgcccgagtgtgctatggtctgggcatggagcacttgcgagaggtgagggcagttaccagtgccaatatccaggagtttgctggctgcaagaagatctttgggagcctggcatttctgccggagagctttgatggggacccagcctccaacactgccccgctccagccagagcagctccaagtgtttgagactctggaagagatcacaggttacctatacatctcagcatggccggacagcctgcctgacctcagcgtcttccagaacctgcaagtaatccggggacgaattctgcacaatggcgcctactcgctgaccctgcaagggctgggcatcagctggctggggctgcgctcactgagggaactgggcagtggactggccctcatccaccataacacccacctctgcttcgtgcacacggtgccctgggaccagctctttcggaacccgcaccaagctctgctccacactgccaaccggccagaggacgagtgtgtgggcgagggcctggcctgccaccagctgtgcgcccgagggcactgctggggtccagggcccacccagtgtgtcaactgcagccagttccttcggggccaggagtgcgtggaggaatgccgagtactgcaggggctccccagggagtatgtgaatgccaggcactgtttgccgtgccaccctgagtgtcagccccagaatggctcagtgacctgttttggaccggaggctgaccagtgtgtggcctgtgcccactataaggaccctcccttctgcgtggcccgctgccccagcggtgtgaaacctgacctctcctacatgcccatctggaagtttccagatgaggagggcgcatgccagccttgccccatcaactgcacccactcctgtgtggacctggatgacaagggctgccccgccgagcagagagccagccctctgacgtccatcatctctgcggtggttggcattctgctggtcgtggtcttgggggtggtctttgggatcctcatcaagcgacggcagcagaagatccggaagtacacgatgcggagactgctgcaggaaacggagctggtggagccgctgacacctagcggagcgatgcccaaccaggcgcagatgcggatcctgaaagagacggagctgaggaaggtgaaggtgcttggatctggcgcttttggcacagtctacaagggcatctggatccctgatggggagaatgtgaaaattccagtggccatcaaagtgttgagggaaaacacatcccccaaagccaacaaagaaatcttagacgaagcatacgtgatggctggtgtgggctccccatatgtctcccgccttctgggcatctgcctgacatccacggtgcagctggtgacacagcttatgccctatggctgcctcttagaccatgtccgggaaaaccgcggacgcctgggctcccaggacctgctgaactggtgtatgcagattgccaaggggatgagctacctggaggatgtgcggctcgtacacagggacttggccgctcggaacgtgctggtcaagagtcccaaccatgtcaaaattacagacttcgggctggctcggctgctggacattgacgagacagagtaccatgcagatgggggcaaggtgcccatcaagtggatggcgctggagtccattctccgccggcggttcacccaccagagtgatgtgtggagttatggtgtgactgtgtgggagctgatgacttttggggccaaaccttacgatgggatcccagcccgggagatccctgacctgctggaaaagggggagcggctgccccagccccccatctgcaccattgatgtctacatgatcatggtcaaatgttggatgattgactctgaatgtcggccaagattccgggagttggtgtctgaattctcccgcatggccagggacccccagcgctttgtggtcatccagaatgaggacttgggcccagccagtcccttggacagcaccttctaccgctcactgctggaggacgatgacatgggggacctggtggatgctgaggagtatctggtaccccagcagggcttcttctgtccagaccctgccccgggcgctgggggcatggtccaccacaggcaccgcagctcatctaccaggagtggcggtggggacctgacactagggctggagccctctgaagaggaggcccccaggtctccactggcaccctccgaaggggctggctccgatgtatttgatggtgacctgggaatgggggcagccaaggggctgcaaagcctccccacacatgaccccagccctctacagcggtacagtgaggaccccacagtacccctgccctctgagactgatggctacgttgcccccctgacctgcagcccccagcctgaatatgtgaaccagccagatgttcggccccagcccccttcgccccgagagggccctctgcctgctgcccgacctgctggtgccactctggaaaggcccaagactctctccccagggaagaatggggtcgtcaaagacgtttttgcctttgggggtgccgtggagaaccccgagtacttgacaccccagggaggagctgcccctcagccccaccctcctcctgccttcagcccagccttcgacaacctctattactgggaccaggacccaccagagcggggggctccacccagcaccttcaaagggacacctacggcagagaacccagagtacctgggtctggacgtgccagtg

SEQ ID NO: 165 - DNA, 567 bp, Homo sapiens
  KRAS
atgactgaatataaacttgtggtagttggagctggtggcgtaggcaagagtgccttgacgatacagctaattcagaatcattttgtggacgaatatgatccaacaatagaggattcctacaggaagcaagtagtaattgatggagaaacctgtctcttggatattctcgacacagcaggtcaagaggagtacagtgcaatgagggaccagtacatgaggactggggagggctttctttgtgtatttgccataaataatactaaatcatttgaagatattcaccattatagagaacaaattaaaagagttaaggactctgaagatgtacctatggtcctagtaggaaataaatgtgatttgccttctagaacagtagacacaaaacaggctcaggacttagcaagaagttatggaattccttttattgaaacatcagcaaagacaagacagagagtggaggatgctttttatacattggtgagggagatccgacaatacagattgaaaaaaatcagcaaagaagaaaagactcctggctgtgtgaaaattaaaaaatgcattataatg

SEQ ID NO: 166 - DNA, 1809 bp, Homo sapiens
  PLK1
atgagtgctgcagtgactgcagggaagctggcacgggcaccggccgaccctgggaaagccggggtccccggagttgcagctcccggagctccggcggcggctccaccggcgaaagagatcccggaggtcctagtggacccacgcagccggcggcgctatgtgcggggccgctttttgggcaagggcggctttgccaagtgcttcgagatctcggacgcggacaccaaggaggtgttcgcgggcaagattgtgcctaagtctctgctgctcaagccgcaccagagggagaagatgtccatggaaatatccattcaccgcagcctcgcccaccagcacgtcgtaggattccacggctttttcgaggacaacgacttcgtgttcgtggtgttggagctctgccgccggaggtctctcctggagctgcacaagaggaggaaagccctgactgagcctgaggcccgatactacctacggcaaattgtgcttggctgccagtacctgcaccgaaaccgagttattcatcgagacctcaagctgggcaaccttttcctgaatgaagatctggaggtgaaaataggggattttggactggcaaccaaagtcgaatatgacggggagaggaagaagaccctgtgtgggactcctaattacatagctcccgaggtgctgagcaagaaagggcacagtttcgaggtggatgtgtggtccattgggtgtatcatgtataccttgttagtgggcaaaccaccttttgagacttcttgcctaaaagagacctacctccggatcaagaagaatgaatacagtattcccaagcacatcaaccccgtggccgcctccctcatccagaagatgcttcagacagatcccactgcccgcccaaccattaacgagctgcttaatgacgagttctttacttctggctatatccctgcccgtctccccatcacctgcctgaccattccaccaaggttttcgattgctcccagcagcctggaccccagcaaccggaagcccctcacagtcctcaataaaggcttggagaaccccctgcctgagcgtccccgggaaaaagaagaaccagtggttcgagagacaggtgaggtggtcgactgccacctcagtgacatgctgcagcagctgcacagtgtcaatgcctccaagccctcggagcgtgggctggtcaggcaagaggaggctgaggatcctgcctgcatccccatcttctgggtcagcaagtgggtggactattcggacaagtacggccttgggtatcagctctgtgataacagcgtgggggtgctcttcaatgactcaacacgcctcatcctctacaatgatggtgacagcctgcagtacatagagcgtgacggcactgagtcctacctcaccgtgagttcccatcccaactccttgatgaagaagatcaccctccttaaatatttccgcaattacatgagcgagcacttgctgaaggcaggtgccaacatcacgccgcgcgaaggtgatgagctcgcccggctgccctacctacggacctggttccgcacccgcagcgccatcatcctgcacctcagcaacggcagcgtgcagatcaacttcttccaggatcacaccaagctcatcttgtgcccactgatggcagccgtgacctacatcgacgagaagcgggacttccgcacataccgcctgagtctcctggaggagtacggctgctgcaaggagctggccagccggctccgctacgcccgcactatggtggacaagctgctgagctcacgctcggccagcaaccgtctcaaggcctcc

SEQ ID NO: 167 - DNA, 876 bp, Salmonella typhimurium
  dapA, strain LT2
atgttcacgggaagtattgtcgcgcttgttacgccgatggatgagaaaggtaacgtcagtaggtcttgcctgaaaaaactcattgattatcatgtcgccaacggtacctcggcgattgtttcggttggcactaccggcgagtctgccacgctaagccatgatgaacatggcgatgtcgtgatgatgacgctggaactggctgacggacgtattccggttatcgccggcacgggcgcaaacgcgaccgcggaagcgattagcctgacgcagcgttttaacgatagcggtattgtaggctgcctgacggtaacgccgtactacaatcgccccacgcaggaaggtttgttccagcatttcaaagccatcgcggaacacactgacttgccgcaaattctgtataatgtgccgtcccgtaccggttgcgatatgttgccggaaaccgtgggtcgtctggcggaaataaaaaatattatcgctatcaaagaggcgacagggaacttaacccgcgttcaccagatcaaagagctggtttcagacgattttattctgcttagcggcgatgacgcgtctgcgctggactttatgcaactgggtggtcatggcgtgatttccgttacggctaacgtagcggcgcgcgagatggctgacatgtgcaaactggcggcggaagggcaatttgccgaggcgcgcgctatcaaccagcgtctgatgccgttacacaacaaactatttgtcgaacccaatcctatcccggtgaaatgggcatgtaaggcattgggtcttgtggcgaccgacacgctgcgcctgccaatgacgcctatcacggaccatggtcgtgacatcgtcaaagcagcgcttcagcatgctggcctgctg

SEQ ID NO: 168 - DNA, 819 bp, Salmonella typhimurium
  dapB, strain LT2
atgcatgaagcacaaatccgcgtcgccattgccggcgccggtggccgcatgggacggcagttaatccaggccgccatggcgatggaaggtgttcagctgggtgccgcgctggagcgcgaaggctcttccttgctgggcagcgatgctggcgaactggcaggggcgggaaagtccggcgtgatcgttcaaagcagccttgaggcggtaaaagatgattttgacgttttcatcgattttacccgtccggaaggcacgttgacgcatctggcgttttgccgccagcatggtaaagggatggtgattggtactaccggctttgacgacgccggtaaacaagccattcgcgaggcgtcacaagagattgcgatcgttttcgccgcaaactttagcgtcggcgttaacgtcatgctcaagctgctggagaaagccgcgaaggtaatgggcgactatagcgatattgaaattattgaagcgcaccaccgccataaagtggatgcaccgtcgggtacggcgctggcaatgggcgaggcaatcgccggggcgctggataaaaatctgaaggactgcgcggtctactcgcgtgaaggttataccggcgagcgcgtagcgggcacgattggctttgcgaccgttcgggcgggcgacatcgtcggcgaacataccgcgatgtttgccgatattggcgagcgcgtagagattacgcataaagcttccagccgcatgacgtttgcaaatggcgcgttgcgatcggcgttatggctaaaaacgaagaaaaatgggctatttgacatgcgggatgtgctggggctggatgtatta

SEQ ID NO: 169 - DNA, 876 bp, E. coli
  dapA
atgttcacgggaagtattgtcgcgattgttactccgatggatgaaaaaggtaatgtctgtcgggctagcttgaaaaaactgattgattatcatgtcgccagcggtacttcggcgatcgtttctgttggcaccactggcgagtccgctaccttaaatcatgacgaacatgctgatgtggtgatgatgacgctggatctggctgatgggcgcattccggtaattgccgggaccggcgctaacgctactgcggaagccattagcctgacgcagcgcttcaatgacagtggtatcgtcggctgcctgacggtaaccccttactacaatcgtccgtcgcaagaaggtttgtatcagcatttcaaagccatcgctgagcatactgacctgccgcaaattctgtataatgtgccgtcccgtactggctgcgatctgctcccggaaacggtgggccgtctggcgaaagtaaaaaatattatcggaatcaaagaggcaacagggaacttaacgcgtgtaaaccagatcaaagagctggtttcagatgattttgttctgctgagcggcgatgatgcgagcgcgctggacttcatgcaattgggcggtcatggggttatttccgttacgactaacgtcgcagcgcgtgatatggcccagatgtgcaaactggcagcagaagaacattttgccgaggcacgcgttattaatcagcgtctgatgccattacacaacaaactatttgtcgaacccaatccaatcccggtgaaatgggcatgtaaggaactgggtcttgtggcgaccgatacgctgcgcctgccaatgacaccaatcaccgacagtggtcgtgagacggtcagagcggcgcttaagcatgccggtttgctg

SEQ ID NO: 170 - DNA, 819 bp, E. coli
  dapB
atgcatgatgcaaacatccgcgttgccatcgcgggagccggggggcgtatgggccgccagttgattcaggcggcgctggcattagagggcgtgcagttgggcgctgcgctggagcgtgaaggatcttctttactgggcagcgacgccggtgagctggccggagccgggaaaacaggcgttaccgtgcaaagcagcctcgatgcggtaaaagatgattttgatgtgtttatcgattttacccgtccggaaggtacgctgaaccatctcgctttttgtcgccagcatggcaaagggatggtgatcggcactacggggtttgacgaagccggtaaacaagcaattcgtgacgccgctgccgatattgcgattgtctttgcggccaattttagcgttggcgttaacgtcatgcttaagctgctggagaaagcagccaaagtgatgggtgactacaccgatatcgaaattattgaagcacatcatagacataaagttgatgcgccgtcaggcaccgcactggcaatgggagaggcgatcgcccacgcccttgataaagatctgaaagattgcgcggtctacagtcgtgaaggccacaccggtgaacgtgtgcctggcaccattggttttgccaccgtgcgtgcaggtgacatcgttggtgaacataccgcgatgtttgccgatattggcgagcgtctggagatcacccataaggcgtccagccgtatgacatttgctaacggcgcggtaagatcggctttgtggttgagtggtaaggaaagcggtctttttgatatgcgagatgtacttgatctcaataatttg

SEQ ID NO: 171 - DNA, 1218 bp, E. coli
  dapC
atggcaattgaacaaacagcaattacacgcgcgactttcgatgaagtgatcctgccgatttatgctccggcagagtttattccggtaaaaggtcagggcagccgaatctgggatcagcaaggcaaggagtatgtcgatttcgcgggtggcattgcagttacggcgttgggccattgccatcctgcgctggtgaacgcgttaaaaacccagggcgaaactctgtggcatatcagtaacgttttcaccaatgaaccggcgctgcgtcttgggcgtaaactgattgaggcaacgtttgccgaacgcgtggtgtttatgaactccggcacggaagctaacgaaaccgcctttaaactggcacgccattacgcctgtgtgcgtcatagcccgttcaaaaccaaaattattgccttccataacgcttttcatggtcgctcgctgtttaccgtttcggtgggtgggcagccaaaatattccgacggctttgggccgaaaccggcagacatcatccacgttccctttaacgatctccatgcagtgaaagcggtgatggatgatcacacctgtgcggtggtggttgagccgatccagggcgagggcggtgtgacggcagcgacgccagagtttttgcagggcttgcgcgagctgtgcgatcaacatcaggcattattggtgtttgatgaagtgcagtgcgggatggggcggaccggcgatttgtttgcttacatgcactacgcgttagcgccggatattctgacctctgcgaaagcgttaggcggcggcttcccgattagcgccatgctgaccacggcggaaattgcttctgcgtttcatcctggttctcacggttccacctacggcggtaatcctctggcctgtgcagtagcgggggcggcgtttgatatcatcaatacccctgaagtgctggaaggcattcaggcgaaacgccagcgttttgttgaccatctgcagaagatcgatcagcagtacgatgtatttagcgatattcgcggtatggggctgttgattggcgcagagctgaaaccacagtacaaaggtcgggcgcgtgatttcctgtatgcgggcgcagaggctggcgtaatggtgctgaatgccggaccggatgtgatgcgttttgcaccgtcgctggtggtggaagatgcggatatcgatgaagggatgcaacgtttcgcccacgcggtggcgaaggtggttggggcg

SEQ ID NO: 172 - DNA, 822 bp, E. coli
  dapD
atgcagcagttacagaacattattgaaaccgcttttgaacgccgtgccgagatcacgccagccaatgcagacaccgttacccgcgaagcggataatcaggtgatcgccctgctggattccggcgcactgcgtgtagcggaaaaaattgacggtcagtgggtgacgcatcagtggttgaaaaaagcggtgctgctctctttccgtattaatgataatcaggtgatcgaaggggcagaaagccgctacttcgacaaagtgccgatgaaattcgccgactacgacgaagcacgtttccagaaagaaggcttccgcgttgtgccaccagcggcggtacgtcagggtgcgtttattgcccgtaacaccgtgctgatgccgtcttacgtcaacatcggcgcatatgttgatgaaggcaccatggttgatacctgggcgaccgtcggttcttgtgcgcagattggtaaaaacgttcacctttccggtggcgtgcgcatcggcggcgtgctggaaccgctgcaggctaacccaaccatgattgaagataattgcttcatcggcgcgcgctctgaactggttgaaggggtgattgtcgaagaaggttccgtcatttccatgggcgtatacattggtcagagcacccgtatttacgaccgtgaaaccggcgaaatccactacggtcgcgttccggcggggtctgtggttgtttcaggtaatctgccgtcaaaagatggcaaatacagcctctactgtgcggttatcgttaagaaagttgacgcgaaaactcgcggcaaagtcggcattaacgaactgctgcgtaccatcgac

SEQ ID NO: 173 - DNA, 1125 bp, E. coli
  dapE
atgtcgtgcccggttattgagctgacacaacagcttattcgccgcccttccctgagtcctgatgatgcaggatgccaggctttgttgattgaacgtttgcaggcgatcggttttaccgttgaacgcatggactttgccgatacgcagaatttttgggcatggcgtgggcagggtgaaacgttagcctttgccgggcataccgacgtggtgccgcctggcgacgccgatcgttggatcaatcccccgtttgaacccaccattcgtgacggcatgttattcgggcgcggtgcggcagatatgaaaggctcgctggcggcgatggtggtggcggcagaacgttttgtcgcacaacatcccaaccatacggggcgactggcatttctgatcacctctgatgaagaagccagtgcccacaacggtacggtaaaagtcgtcgaagcgttaatggcacgtaatgagcgtctcgattactgcctggttggcgaaccgtcgagtatcgaagtggtaggtgatgtggtgaaaaatggtcgtcgcggatcattaacctgcaaccttaccattcatggcgttcaggggcatgttgcctacccacatctggctgacaatccggtacatcgcgcagcacctttccttaatgaattagtggctattgagtgggatcagggcaatgaattcttcccggcgaccagtatgcagattgccaatattcaggcgggaacgggcagtaacaacgttattccgggtgaactgtttgtgcagtttaacttccgcttcagcaccgaactgactgatgagatgatcaaagcgcaggtgcttgccctgcttgaaaaacatcaactgcgctatacggtggattggtggctttccgggcagccatttttgaccgcgcgcggtaaactggtggatgcggtcgttaacgcggttgagcactataatgaaattaaaccgcagctactgaccacaggcggaacgtccgacgggcgctttattgcccgcatgggggcgcaggtggtggaactcgggccggtcaatgccactattcataaaattaatgaatgtgtgaacgctgccgacctgcagctacttgcccgtatgtatcaacgtatcatggaacagctcgtcgcc

SEQ ID NO: 174 - DNA, 1179 bp, Homo sapiens
  p53
atggaggagccgcagtcagatcctagcgtcgagccccctctgagtcaggaaacattttcagacctatggaaactacttcctgaaaacaacgttctgtcccccttgccgtcccaagcaatggatgatttgatgctgtccccggacgatattgaacaatggttcactgaagacccaggtccagatgaagctcccagaatgccagaggctgctccccgcgtggcccctgcaccagcagctcctacaccggcggcccctgcaccagccccctcctggcccctgtcatcttctgtcccttcccagaaaacctaccagggcagctacggtttccgtctgggcttcttgcattctgggacagccaagtctgtgacttgcacgtactcccctgccctcaacaagatgttttgccaactggccaagacctgccctgtgcagctgtgggttgattccacacccccgcccggcacccgcgtccgcgccatggccatctacaagcagtcacagcacatgacggaggttgtgaggcgctgcccccaccatgagcgctgctcagatagcgatggtctggcccctcctcagcatcttatccgagtggaaggaaatttgcgtgtggagtatttggatgacagaaacacttttcgacatagtgtggtggtgccctatgagccgcctgaggttggctctgactgtaccaccatccactacaactacatgtgtaacagttcctgcatgggcggcatgaaccggaggcccatcctcaccatcatcacactggaagactccagtggtaatctactgggacggaacagctttgaggtgcatgtttgtgcctgtcctgggagagaccggcgcacagaggaagagaatctccgcaagaaaggggagcctcaccacgagctgcccccagggagcactaagcgagcactgtccaacaacaccagctcctctccccagccaaagaagaaaccactggatggagaatatttcacccttcagatccgtgggcgtgagcgcttcgagatgttccgagagctgaatgaggccttggaactcaaggatgcccaggctgggaaggagccaggggggagcagggctcactccagccacctgaagtccaaaaagggtcagtctacctcccgccataaaaaactcatgttcaagacagaagggcctgactcagac

SEQ ID NO: 175 - DNA, 1470 bp, Homo sapiens
  ERBA
atggaacagaagccaagcaaggtggagtgtgggtcagacccagaggagaacagtgccaggtcaccagatggaaagcgaaaaagaaagaacggccaatgttccctgaaaaccagcatgtcagggtatatccctagttacctggacaaagacgagcagtgtgtcgtgtgtggggacaaggcaactggttatcactaccgctgtatcacttgtgagggctgcaagggcttctttcgccgcacaatccagaagaacctccatcccacctattcctgcaaatatgacagctgctgtgtcattgacaagatcacccgcaatcagtgccagctgtgccgcttcaagaagtgcatcgccgtgggcatggccatggacttggttctagatgactcgaagcgggtggccaagcgtaagctgattgagcagaaccgggagcggcggcggaaggaggagatgatccgatcactgcagcagcgaccagagcccactcctgaagagtgggatctgatccacattgccacagaggcccatcgcagcaccaatgcccagggcagccattggaaacagaggcggaaattcctgcccgatgacattggccagtcacccattgtctccatgccggacggagacaaggtggacctggaagccttcagcgagtttaccaagatcatcaccccggccatcacccgtgtggtggactttgccaaaaaactgcccatgttctccgagctgccttgcgaagaccagatcatcctcctgaaggggtgctgcatggagatcatgtccctgcgggcggctgtccgctacgaccctgagagcgacaccctgacgctgagtggggagatggctgtcaagcgggagcagctcaagaatggcggcctgggcgtagtctccgacgccatctttgaactgggcaagtcactctctgcctttaacctggatgacacggaagtggctctgctgcaggctgtgctgctaatgtcaacagaccgctcgggcctgctgtgtgtggacaagatcgagaagagtcaggaggcgtacctgctggcgttcgagcactacgtcaaccaccgcaaacacaacattccgcacttctggcccaagctgctgatgaaggagagagaagtgcagagttcgattctgtacaagggggcagcggcagaaggccggccgggcgggtcactgggcgtccacccggaaggacagcagcttctcggaatgcatgttgttcagggtccgcaggtccggcagcttgagcagcagcttggtgaagcgggaagtctccaagggccggttcttcagcaccagagcccgaagagcccgcagcagcgtctcctggagctgctccaccgaagcggaattctccatgcccgagcggtctgtggggaagacgacagcagtgaggcggactccccgagctcctctgaggaggaaccggaggtctgcgaggacctggcaggcaatgcagcctctccc

SEQ ID NO: 176 - DNA, 1317 bp, Homo sapiens
  myc
atgcccctcaacgttagcttcaccaacaggaactatgacctcgactacgactcggtgcagccgtatttctactgcgacgaggaggagaacttctaccagcagcagcagcagagcgagctgcagcccccggcgcccagcgaggatatctggaagaaattcgagctgctgcccaccccgcccctgtcccctagccgccgctccgggctctgctcgccctcctacgttgcggtcacacccttctcccttcggggagacaacgacggcggtggcgggagcttctccacggccgaccagctggagatggtgaccgagctgctgggaggagacatggtgaaccagagtttcatctgcgacccggacgacgagaccttcatcaaaaacatcatcatccaggactgtatgtggagcggcttctcggccgccgccaagctcgtctcagagaagctggcctcctaccaggctgcgcgcaaagacagcggcagcccgaaccccgcccgcggccacagcgtctgctccacctccagcttgtacctgcaggatctgagcgccgccgcctcagagtgcatcgacccctcggtggtcttcccctaccctctcaacgacagcagctcgcccaagtcctgcgcctcgcaagactccagcgccttctctccgtcctcggattctctgctctcctcgacggagtcctccccgcagggcagccccgagcccctggtgctccatgaggagacaccgcccaccaccagcagcgactctgaggaggaacaagaagatgaggaagaaatcgatgttgtttctgtggaaaagaggcaggctcctggcaaaaggtcagagtctggatcaccttctgctggaggccacagcaaacctcctcacagcccactggtcctcaagaggtgccacgtctccacacatcagcacaactacgcagcgcctccctccactcggaaggactatcctgctgccaagagggtcaagttggacagtgtcagagtcctgagacagatcagcaacaaccgaaaatgcaccagccccaggtcctcggacaccgaggagaatgtcaagaggcgaacacacaacgtcttggagcgccagaggaggaacgagctaaaacggagcttttttgccctgcgtgaccagatcccggagttggaaaacaatgaaaaggcccccaaggtagttatccttaaaaaagccacagcatacatcctgtccgtccaagcagaggagcaaaagctcatttctgaagaggacttgttgcggaaacgacgagaacagttgaaacacaaacttgaacagctacggaactcttgtgcg

SEQ ID NO: 177 - DNA, 2283 bp, Homo sapiens
  MYB
atggcccgaagaccccggcacagcatatatagcagtgacgaggatgatgaggactttgagatgtgtgaccatgactatgatgggctgcttcccaagtctggaaagcgtcacttggggaaaacaaggtggacccgggaagaggatgaaaaactgaagaagctggtggaacagaatggaacagatgactggaaagttattgccaattatctcccgaatcgaacagatgtgcagtgccagcaccgatggcagaaagtactaaaccctgagctcatcaagggtccttggaccaaagaagaagatcagagagtgatagagcttgtacagaaatacggtccgaaacgttggtctgttattgccaagcacttaaaggggagaattggaaaacaatgtagggagaggtggcataaccacttgaatccagaagttaagaaaacctcctggacagaagaggaagacagaattatttaccaggcacacaagagactggggaacagatgggcagaaatcgcaaagctactgcctggacgaactgataatgctatcaagaaccactggaattctacaatgcgtcggaaggtcgaacaggaaggttatctgcaggagtcttcaaaagccagccagccagcagtggccacaagcttccagaagaacagtcatttgatgggttttgctcaggctccgcctacagctcaactccctgccactggccagcccactgttaacaacgactattcctattaccacatttctgaagcacaaaatgtctccagtcatgttccataccctgtagcgttacatgtaaatatagtcaatgtccctcagccagctgccgcagccattcagagacactataatgatgaagaccctgagaaggaaaagcgaataaaggaattagaattgctcctaatgtcaaccgagaatgagctaaaaggacagcaggtgctaccaacacagaaccacacatgcagctaccccgggtggcacagcaccaccattgccgaccacaccagacctcatggagacagtgcacctgtttcctgtttgggagaacaccactccactccatctctgccagcggatcctggctccctacctgaagaaagcgcctcgccagcaaggtgcatgatcgtccaccagggcaccattctggataatgttaagaacctcttagaatttgcagaaacactccaatttatagattctgattcttcatcatggtgtgatctcagcagttttgaattctttgaagaagcagatttttcacctagccaacatcacacaggcaaagccctacagcttcagcaaagagagggcaatgggactaaacctgcaggagaacctagcccaagggtgaacaaacgtatgttgagtgagagttcacttgacccacccaaggtcttacctcctgcaaggcacagcacaattccactggtcatccttcgaaaaaaacggggccaggccagccccttagccactggagactgtagctccttcatatttgctgacgtcagcagttcaactcccaagcgttcccctgtcaaaagcctacccttctctccctcgcagttcttaaacacttccagtaaccatgaaaactcagacttggaaatgccttctttaacttccacccccctcattggtcacaaattgactgttacaacaccatttcatagagaccagactgtgaaaactcaaaaggaaaatactgtttttagaaccccagctatcaaaaggtcaatcttagaaagctctccaagaactcctacaccattcaaacatgcacttgcagctcaagaaattaaatacggtcccctgaagatgctacctcagacaccctctcatctagtagaagatctgcaggatgtgatcaaacaggaatctgatgaatctggaattgttgctgagtttcaagaaaatggaccacccttactgaagaaaatcaaacaagaggtggaatctccaactgataaatcaggaaacttcttctgctcacaccactgggaaggggacagtctgaatacccaactgttcacgcagacctcgcctgtggcagatgcaccgaatattcttacaagctccgttttaatggcaccagcatcagaagatgaagacaatgttctcaaagcatttacagtacctaaaaacaggtccctggcgagccccttgcagccttgtagcagtacctgggaacctgcatcctgtggaaagatggaggagcagatgacatcttccagtcaagctcgtaaatacgtgaatgcattctcagcccggacgctggtcatg

SEQ ID NO: 178 - DNA, 993 bp, Homo sapiens
  JUN
atgactgcaaagatggaaacgaccttctatgacgatgccctcaacgcctcgttcctcccgtccgagagcggaccttatggctacagtaaccccaagatcctgaaacagagcatgaccctgaacctggccgacccagtggggagcctgaagccgcacctccgcgccaagaactcggacctcctcacctcgcccgacgtggggctgctcaagctggcgtcgcccgagctggagcgcctgataatccagtccagcaacgggcacatcaccaccacgccgacccccacccagttcctgtgccccaagaacgtgacagatgagcaggagggcttcgccgagggcttcgtgcgcgccctggccgaactgcacagccagaacacgctgcccagcgtcacgtcggcggcgcagccggtcaacggggcaggcatggtggctcccgcggtagcctcggtggcagggggcagcggcagcggcggcttcagcgccagcctgcacagcgagccgccggtctacgcaaacctcagcaacttcaacccaggcgcgctgagcagcggcggcggggcgccctcctacggcgcggccggcctggcctttcccgcgcaaccccagcagcagcagcagccgccgcaccacctgccccagcagatgcccgtgcagcacccgcggctgcaggccctgaaggaggagcctcagacagtgcccgagatgcccggcgagacaccgcccctgtcccccatcgacatggagtcccaggagcggatcaaggcggagaggaagcgcatgaggaaccgcatcgctgcctccaagtgccgaaaaaggaagctggagagaatcgcccggctggaggaaaaagtgaaaaccttgaaagctcagaactcggagctggcgtccacggccaacatgctcagggaacaggtggcacagcttaaacagaaagtcatgaaccacgttaacagtgggtgccaactcatgctaacgcagcagttgcaaacattt

SEQ ID NO: 179 - DNA, 3633 bp, Homo sapiens
  ERBB
atgcgaccctccgggacggccggggcagcgctcctggcgctgctggctgcgctctgcccggcgagtcgggctctggaggaaaagaaagtttgccaaggcacgagtaacaagctcacgcagttgggcacttttgaagatcattttctcagcctccagaggatgttcaataactgtgaggtggtccttgggaatttggaaattacctatgtgcagaggaattatgatctttccttcttaaagaccatccaggaggtggctggttatgtcctcattgccctcaacacagtggagcgaattcctttggaaaacctgcagatcatcagaggaaatatgtactacgaaaattcctatgccttagcagtcttatctaactatgatgcaaataaaaccggactgaaggagctgcccatgagaaatttacaggaaatcctgcatggcgccgtgcggttcagcaacaaccctgccctgtgcaacgtggagagcatccagtggcgggacatagtcagcagtgactttctcagcaacatgtcgatggacttccagaaccacctgggcagctgccaaaagtgtgatccaagctgtcccaatgggagctgctggggtgcaggagaggagaactgccagaaactgaccaaaatcatctgtgcccagcagtgctccgggcgctgccgtggcaagtcccccagtgactgctgccacaaccagtgtgctgcaggctgcacaggcccccgggagagcgactgcctggtctgccgcaaattccgagacgaagccacgtgcaaggacacctgccccccactcatgctctacaaccccaccacgtaccagatggatgtgaaccccgagggcaaatacagctttggtgccacctgcgtgaagaagtgtccccgtaattatgtggtgacagatcacggctcgtgcgtccgagcctgtggggccgacagctatgagatggaggaagacggcgtccgcaagtgtaagaagtgcgaagggccttgccgcaaagtgtgtaacggaataggtattggtgaatttaaagactcactctccataaatgctacgaatattaaacacttcaaaaactgcacctccatcagtggcgatctccacatcctgccggtggcatttaggggtgactccttcacacatactcctcctctggatccacaggaactggatattctgaaaaccgtaaaggaaatcacagggtttttgctgattcaggcttggcctgaaaacaggacggacctccatgcctttgagaacctagaaatcatacgcggcaggaccaagcaacatggtcagttttctcttgcagtcgtcagcctgaacataacatccttgggattacgctccctcaaggagataagtgatggagatgtgataatttcaggaaacaaaaatttgtgctatgcaaatacaataaactggaaaaaactgtttgggacctccggtcagaaaaccaaaattataagcaacagaggtgaaaacagctgcaaggccacaggccaggtctgccatgccttgtgctcccccgagggctgctggggcccggagcccagggactgcgtctcttgccggaatgtcagccgaggcagggaatgcgtggacaagtgcaaccttctggagggtgagccaagggagtttgtggagaactctgagtgcatacagtgccacccagagtgcctgcctcaggccatgaacatcacctgcacaggacggggaccagacaactgtatccagtgtgcccactacattgacggcccccactgcgtcaagacctgcccggcaggagtcatgggagaaaacaacaccctggtctggaagtacgcagacgccggccatgtgtgccacctgtgccatccaaactgcacctacggatgcactgggccaggtcttgaaggctgtccaacgaatgggcctaagatcccgtccatcgccactgggatggtgggggccctcctcttgctgctggtggtggccctggggatcggcctcttcatgcgaaggcgccacatcgttcggaagcgcacgctgcggaggctgctgcaggagagggagcttgtggagcctcttacacccagtggagaagctcccaaccaagctctcttgaggatcttgaaggaaactgaattcaaaaagatcaaagtgctgggctccggtgcgttcggcacggtgtataagggactctggatcccagaaggtgagaaagttaaaattcccgtcgctatcaaggaattaagagaagcaacatctccgaaagccaacaaggaaatcctcgatgaagcctacgtgatggccagcgtggacaacccccacgtgtgccgcctgctgggcatctgcctcacctccaccgtgcagctcatcacgcagctcatgcccttcggctgcctcctggactatgtccgggaacacaaagacaatattggctcccagtacctgctcaactggtgtgtgcagatcgcaaagggcatgaactacttggaggaccgtcgcttggtgcaccgcgacctggcagccaggaacgtactggtgaaaacaccgcagcatgtcaagatcacagattttgggctggccaaactgctgggtgcggaagagaaagaataccatgcagaaggaggcaaagtgcctatcaagtggatggcattggaatcaattttacacagaatctatacccaccagagtgatgtctggagctacggggtgactgtttgggagttgatgacctttggatccaagccatatgacggaatccctgccagcgagatctcctccatcctggagaaaggagaacgcctccctcagccacccatatgtaccatcgatgtctacatgatcatggtcaagtgctggatgatagacgcagatagtcgcccaaagttccgtgagttgatcatcgaattctccaaaatggcccgagacccccagcgctaccttgtcattcagggggatgaaagaatgcatttgccaagtcctacagactccaacttctaccgtgccctgatggatgaagaagacatggacgacgtggtggatgccgacgagtacctcatcccacagcagggcttcttcagcagcccctccacgtcacggactcccctcctgagctctctgagtgcaaccagcaacaattccaccgtggcttgcattgatagaaatgggctgcaaagctgtcccatcaaggaagacagcttcttgcagcgatacagctcagaccccacaggcgccttgactgaggacagcatagacgacaccttcctcccagtgcctgaatacataaaccagtccgttcccaaaaggcccgctggctctgtgcagaatcctgtctatcacaatcagcctctgaaccccgcgcccagcagagacccacactaccaggacccccacagcactgcagtgggcaaccccgagtatctcaacactgtccagcccacctgtgtcaacagcacattcgacagccctgcccactgggcccagaaaggcagccaccaaattagcctggacaaccctgactaccagcaggacttctttcccaaggaagccaagccaaatggcatctttaagggctccacagctgaaaatgcagaatacctaagggtcgcgccacaaagcagtgaatttattggagcatga

SEQ ID NO: 180 - DNA, 5589 bp, Homo sapiens
  BRCA1
atggatttatctgctcttcgcgttgaagaagtacaaaatgtcattaatgctatgcagaaaatcttagagtgtcccatctgtctggagttgatcaaggaacctgtctccacaaagtgtgaccacatattttgcaaattttgcatgctgaaacttctcaaccagaagaaagggccttcacagtgtcctttatgtaagaatgatataaccaaaaggagcctacaagaaagtacgagatttagtcaacttgttgaagagctattgaaaatcatttgtgcttttcagcttgacacaggtttggagtatgcaaacagctataattttgcaaaaaaggaaaataactctcctgaacatctaaaagatgaagtttctatcatccaaagtatgggctacagaaaccgtgccaaaagacttctacagagtgaacccgaaaatccttccttgcaggaaaccagtctcagtgtccaactctctaaccttggaactgtgagaactctgaggacaaagcagcggatacaacctcaaaagacgtctgtctacattgaattgggatctgattcttctgaagataccgttaataaggcaacttattgcagtgtgggagatcaagaattgttacaaatcacccctcaaggaaccagggatgaaatcagtttggattctgcaaaaaaggctgcttgtgaattttctgagacggatgtaacaaatactgaacatcatcaacccagtaataatgatttgaacaccactgagaagcgtgcagctgagaggcatccagaaaagtatcagggtagttctgtttcaaacttgcatgtggagccatgtggcacaaatactcatgccagctcattacagcatgagaacagcagtttattactcactaaagacagaatgaatgtagaaaaggctgaattctgtaataaaagcaaacagcctggcttagcaaggagccaacataacagatgggctggaagtaaggaaacatgtaatgataggcggactcccagcacagaaaaaaaggtagatctgaatgctgatcccctgtgtgagagaaaagaatggaataagcagaaactgccatgctcagagaatcctagagatactgaagatgttccttggataacactaaatagcagcattcagaaagttaatgagtggttttccagaagtgatgaactgttaggttctgatgactcacatgatggggagtctgaatcaaatgccaaagtagctgatgtattggacgttctaaatgaggtagatgaatattctggttcttcagagaaaatagacttactggccagtgatcctcatgaggctttaatatgtaaaagtgaaagagttcactccaaatcagtagagagtaatattgaagacaaaatatttgggaaaacctatcggaagaaggcaagcctccccaacttaagccatgtaactgaaaatctaattataggagcatttgttactgagccacagataatacaagagcgtcccctcacaaataaattaaagcgtaaaaggagacctacatcaggccttcatcctgaggattttatcaagaaagcagatttggcagttcaaaagactcctgaaatgataaatcagggaactaaccaaacggagcagaatggtcaagtgatgaatattactaatagtggtcatgagaataaaacaaaaggtgattctattcagaatgagaaaaatcctaacccaatagaatcactcgaaaaagaatctgctttcaaaacgaaagctgaacctataagcagcagtataagcaatatggaactcgaattaaatatccacaattcaaaagcacctaaaaagaataggctgaggaggaagtcttctaccaggcatattcatgcgcttgaactagtagtcagtagaaatctaagcccacctaattgtactgaattgcaaattgatagttgttctagcagtgaagagataaagaaaaaaaagtacaaccaaatgccagtcaggcacagcagaaacctacaactcatggaaggtaaagaacctgcaactggagccaagaagagtaacaagccaaatgaacagacaagtaaaagacatgacagcgatactttcccagagctgaagttaacaaatgcacctggttcttttactaagtgttcaaataccagtgaacttaaagaatttgtcaatcctagccttccaagagaagaaaaagaagagaaactagaaacagttaaagtgtctaataatgctgaagaccccaaagatctcatgttaagtggagaaagggttttgcaaactgaaagatctgtagagagtagcagtatttcattggtacctggtactgattatggcactcaggaaagtatctcgttactggaagttagcactctagggaaggcaaaaacagaaccaaataaatgtgtgagtcagtgtgcagcatttgaaaaccccaagggactaattcatggttgttccaaagataatagaaatgacacagaaggctttaagtatccattgggacatgaagttaaccacagtcgggaaacaagcatagaaatggaagaaagtgaacttgatgctcagtatttgcagaatacattcaaggtttcaaagcgccagtcatttgctccgttttcaaatccaggaaatgcagaagaggaatgtgcaacattctctgcccactctgggtccttaaagaaacaaagtccaaaagtcacttttgaatgtgaacaaaaggaagaaaatcaaggaaagaatgagtctaatatcaagcctgtacagacagttaatatcactgcaggctttcctgtggttggtcagaaagataagccagttgataatgccaaatgtagtatcaaaggaggctctaggttttgtctatcatctcagttcagaggcaacgaaactggactcattactccaaataaacatggacttttacaaaacccatatcgtataccaccactttttcccatcaagtcatttgttaaaactaaatgtaagaaaaatctgctagaggaaaactttgaggaacattcaatgtcacctgaaagagaaatgggaaatgagaacattccaagtacagtgagcacaattagccgtaataacattagagaaaatgtttttaaagaagccagctcaagcaatattaatgaagtaggttccagtactaatgaagtgggctccagtattaatgaaataggttccagtgatgaaaacattcaagcagaactaggtagaaacagagggccaaaattgaatgctatgcttagattaggggttttgcaacctgaggtctataaacaaagtcttcctggaagtaattgtaagcatcctgaaataaaaaagcaagaatatgaagaagtagttcagactgttaatacagatttctctccatatctgatttcagataacttagaacagcctatgggaagtagtcatgcatctcaggtttgttctgagacacctgatgacctgttagatgatggtgaaataaaggaagatactagttttgctgaaaatgacattaaggaaagttctgctgtttttagcaaaagcgtccagaaaggagagcttagcaggagtcctagccctttcacccatacacatttggctcagggttaccgaagaggggccaagaaattagagtcctcagaagagaacttatctagtgaggatgaagagcttccctgcttccaacacttgttatttggtaaagtaaacaatataccttctcagtctactaggcatagcaccgttgctaccgagtgtctgtctaagaacacagaggagaatttattatcattgaagaatagcttaaatgactgcagtaaccaggtaatattggcaaaggcatctcaggaacatcaccttagtgaggaaacaaaatgttctgctagcttgttttcttcacagtgcagtgaattggaagacttgactgcaaatacaaacacccaggatcctttcttgattggttcttccaaacaaatgaggcatcagtctgaaagccagggagttggtctgagtgacaaggaattggtttcagatgatgaagaaagaggaacgggcttggaagaaaataatcaagaagagcaaagcatggattcaaacttaggtgaagcagcatctgggtgtgagagtgaaacaagcgtctctgaagactgctcagggctatcctctcagagtgacattttaaccactcagcagagggataccatgcaacataacctgataaagctccagcaggaaatggctgaactagaagctgtgttagaacagcatgggagccagccttctaacagctacccttccatcataagtgactcttctgcccttgaggacctgcgaaatccagaacaaagcacatcagaaaaagcagtattaacttcacagaaaagtagtgaataccctataagccagaatccagaaggcctttctgctgacaagtttgaggtgtctgcagatagttctaccagtaaaaataaagaaccaggagtggaaaggtcatccccttctaaatgcccatcattagatgataggtggtacatgcacagttgctctgggagtcttcagaatagaaactacccatctcaagaggagctcattaaggttgttgatgtggaggagcaacagctggaagagtctgggccacacgatttgacggaaacatcttacttgccaaggcaagatctagagggaaccccttacctggaatctggaatcagcctcttctctgatgaccctgaatctgatccttctgaagacagagccccagagtcagctcgtgttggcaacataccatcttcaacctctgcattgaaagttccccaattgaaagttgcagaatctgcccagagtccagctgctgctcatactactgatactgctgggtataatgcaatggaagaaagtgtgagcagggagaagccagaattgacagcttcaacagaaagggtcaacaaaagaatgtccatggtggtgtctggcctgaccccagaagaatttatgctcgtgtacaagtttgccagaaaacaccacatcactttaactaatctaattactgaagagactactcatgttgttatgaaaacagatgctgagtttgtgtgtgaacggacactgaaatattttctaggaattgcgggaggaaaatgggtagttagctatttctgggtgacccagtctattaaagaaagaaaaatgctgaatgagcatgattttgaagtcagaggagatgtggtcaatggaagaaaccaccaaggtccaaagcgagcaagagaatcccaggacagaaagatcttcagggggctagaaatctgttgctatgggcccttcaccaacatgcccacagatcaactggaatggatggtacagctgtgtggtgcttctgtggtgaaggagctttcatcattcacccttggcacaggtgtccacccaattgtggttgtgcagccagatgcctggacagaggacaatggcttccatgcaattgggcagatgtgtgaggcacctgtggtgacccgagagtgggtgttggacagtgtagcactctaccagtgccaggagctggacacctacctgataccccagatcccccacagccactac

SEQ ID NO: 181 - DNA, 10254 bp, Homo sapiens
  BRCA2
atgcctattggatccaaagagaggccaacattttttgaaatttttaagacacgctgcaacaaagcagatttaggaccaataagtcttaattggtttgaagaactttcttcagaagctccaccctataattctgaacctgcagaagaatctgaacataaaaacaacaattacgaaccaaacctatttaaaactccacaaaggaaaccatcttataatcagctggcttcaactccaataatattcaaagagcaagggctgactctgccgctgtaccaatctcctgtaaaagaattagataaattcaaattagacttaggaaggaatgttcccaatagtagacataaaagtcttcgcacagtgaaaactaaaatggatcaagcagatgatgtttcctgtccacttctaaattcttgtcttagtgaaagtcctgttgttctacaatgtacacatgtaacaccacaaagagataagtcagtggtatgtgggagtttgtttcatacaccaaagtttgtgaagggtcgtcagacaccaaaacatatttctgaaagtctaggagctgaggtggatcctgatatgtcttggtcaagttctttagctacaccacccacccttagttctactgtgctcatagtcagaaatgaagaagcatctgaaactgtatttcctcatgatactactgctaatgtgaaaagctatttttccaatcatgatgaaagtctgaagaaaaatgatagatttatcgcttctgtgacagacagtgaaaacacaaatcaaagagaagctgcaagtcatggatttggaaaaacatcagggaattcatttaaagtaaatagctgcaaagaccacattggaaagtcaatgccaaatgtcctagaagatgaagtatatgaaacagttgtagatacctctgaagaagatagtttttcattatgtttttctaaatgtagaacaaaaaatctacaaaaagtaagaactagcaagactaggaaaaaaattttccatgaagcaaacgctgatgaatgtgaaaaatctaaaaaccaagtgaaagaaaaatactcatttgtatctgaagtggaaccaaatgatactgatccattagattcaaatgtagcaaatcagaagccctttgagagtggaagtgacaaaatctccaaggaagttgtaccgtctttggcctgtgaatggtctcaactaaccctttcaggtctaaatggagcccagatggagaaaatacccctattgcatatttcttcatgtgaccaaaatatttcagaaaaagacctattagacacagagaacaaaagaaagaaagattttcttacttcagagaattctttgccacgtatttctagcctaccaaaatcagagaagccattaaatgaggaaacagtggtaaataagagagatgaagagcagcatcttgaatctcatacagactgcattcttgcagtaaagcaggcaatatctggaacttctccagtggcttcttcatttcagggtatcaaaaagtctatattcagaataagagaatcacctaaagagactttcaatgcaagtttttcaggtcatatgactgatccaaactttaaaaaagaaactgaagcctctgaaagtggactggaaatacatactgtttgctcacagaaggaggactccttatgtccaaatttaattgataatggaagctggccagccaccaccacacagaattctgtagctttgaagaatgcaggtttaatatccactttgaaaaagaaaacaaataagtttatttatgctatacatgatgaaacatcttataaaggaaaaaaaataccgaaagaccaaaaatcagaactaattaactgttcagcccagtttgaagcaaatgcttttgaagcaccacttacatttgcaaatgctgattcaggtttattgcattcttctgtgaaaagaagctgttcacagaatgattctgaagaaccaactttgtccttaactagctcttttgggacaattctgaggaaatgttctagaaatgaaacatgttctaataatacagtaatctctcaggatcttgattataaagaagcaaaatgtaataaggaaaaactacagttatttattaccccagaagctgattctctgtcatgcctgcaggaaggacagtgtgaaaatgatccaaaaagcaaaaaagtttcagatataaaagaagaggtcttggctgcagcatgtcacccagtacaacattcaaaagtggaatacagtgatactgactttcaatcccagaaaagtcttttatatgatcatgaaaatgccagcactcttattttaactcctacttccaaggatgttctgtcaaacctagtcatgatttctagaggcaaagaatcatacaaaatgtcagacaagctcaaaggtaacaattatgaatctgatgttgaattaaccaaaaatattcccatggaaaagaatcaagatgtatgtgctttaaatgaaaattataaaaacgttgagctgttgccacctgaaaaatacatgagagtagcatcaccttcaagaaaggtacaattcaaccaaaacacaaatctaagagtaatccaaaaaaatcaagaagaaactacttcaatttcaaaaataactgtcaatccagactctgaagaacttttctcagacaatgagaataattttgtcttccaagtagctaatgaaaggaataatcttgctttaggaaatactaaggaacttcatgaaacagacttgacttgtgtaaacgaacccattttcaagaactctaccatggttttatatggagacacaggtgataaacaagcaacccaagtgtcaattaaaaaagatttggtttatgttcttgcagaggagaacaaaaatagtgtaaagcagcatataaaaatgactctaggtcaagatttaaaatcggacatctccttgaatatagataaaataccagaaaaaaataatgattacatgaacaaatgggcaggactcttaggtccaatttcaaatcacagttttggaggtagcttcagaacagcttcaaataaggaaatcaagctctctgaacataacattaagaagagcaaaatgttcttcaaagatattgaagaacaatatcctactagtttagcttgtgttgaaattgtaaataccttggcattagataatcaaaagaaactgagcaagcctcagtcaattaatactgtatctgcacatttacagagtagtgtagttgtttctgattgtaaaaatagtcatataacccctcagatgttattttccaagcaggattttaattcaaaccataatttaacacctagccaaaaggcagaaattacagaactttctactatattagaagaatcaggaagtcagtttgaatttactcagtttagaaaaccaagctacatattgcagaagagtacatttgaagtgcctgaaaaccagatgactatcttaaagaccacttctgaggaatgcagagatgctgatcttcatgtcataatgaatgccccatcgattggtcaggtagacagcagcaagcaatttgaaggtacagttgaaattaaacggaagtttgctggcctgttgaaaaatgactgtaacaaaagtgcttctggttatttaacagatgaaaatgaagtggggtttaggggcttttattctgctcatggcacaaaactgaatgtttctactgaagctctgcaaaaagctgtgaaactgtttagtgatattgagaatattagtgaggaaacttctgcagaggtacatccaataagtttatcttcaagtaaatgtcatgattctgttgtttcaatgtttaagatagaaaatcataatgataaaactgtaagtgaaaaaaataataaatgccaactgatattacaaaataatattgaaatgactactggcacttttgttgaagaaattactgaaaattacaagagaaatactgaaaatgaagataacaaatatactgctgccagtagaaattctcataacttagaatttgatggcagtgattcaagtaaaaatgatactgtttgtattcataaagatgaaacggacttgctatttactgatcagcacaacatatgtcttaaattatctggccagtttatgaaggagggaaacactcagattaaagaagatttgtcagatttaacttttttggaagttgcgaaagctcaagaagcatgtcatggtaatacttcaaataaagaacagttaactgctactaaaacggagcaaaatataaaagattttgagacttctgatacattttttcagactgcaagtgggaaaaatattagtgtcgccaaagagtcatttaataaaattgtaaatttctttgatcagaaaccagaagaattgcataacttttccttaaattctgaattacattctgacataagaaagaacaaaatggacattctaagttatgaggaaacagacatagttaaacacaaaatactgaaagaaagtgtcccagttggtactggaaatcaactagtgaccttccagggacaacccgaacgtgatgaaaagatcaaagaacctactctattgggttttcatacagctagcgggaaaaaagttaaaattgcaaaggaatctttggacaaagtgaaaaacctttttgatgaaaaagagcaaggtactagtgaaatcaccagttttagccatcaatgggcaaagaccctaaagtacagagaggcctgtaaagaccttgaattagcatgtgagaccattgagatcacagctgccccaaagtgtaaagaaatgcagaattctctcaataatgataaaaaccttgtttctattgagactgtggtgccacctaagctcttaagtgataatttatgtagacaaactgaaaatctcaaaacatcaaaaagtatctttttgaaagttaaagtacatgaaaatgtagaaaaagaaacagcaaaaagtcctgcaacttgttacacaaatcagtccccttattcagtcattgaaaattcagccttagctttttacacaagttgtagtagaaaaacttctgtgagtcagacttcattacttgaagcaaaaaaatggcttagagaaggaatatttgatggtcaaccagaaagaataaatactgcagattatgtaggaaattatttgtatgaaaataattcaaacagtactatagctgaaaatgacaaaaatcatctctccgaaaaacaagatacttatttaagtaacagtagcatgtctaacagctattcctaccattctgatgaggtatataatgattcaggatatctctcaaaaaataaacttgattctggtattgagccagtattgaagaatgttgaagatcaaaaaaacactagtttttccaaagtaatatccaatgtaaaagatgcaaatgcatacccacaaactgtaaatgaagatatttgcgttgaggaacttgtgactagctcttcaccctgcaaaaataaaaatgcagccattaaattgtccatatctaatagtaataattttgaggtagggccacctgcatttaggatagccagtggtaaaatcgtttgtgtttcacatgaaacaattaaaaaagtgaaagacatatttacagacagtttcagtaaagtaattaaggaaaacaacgagaataaatcaaaaatttgccaaacgaaaattatggcaggttgttacgaggcattggatgattcagaggatattcttcataactctctagataatgatgaatgtagcacgcattcacataaggtttttgctgacattcagagtgaagaaattttacaacataaccaaaatatgtctggattggagaaagtttctaaaatatcaccttgtgatgttagtttggaaacttcagatatatgtaaatgtagtatagggaagcttcataagtcagtctcatctgcaaatacttgtgggatttttagcacagcaagtggaaaatctgtccaggtatcagatgcttcattacaaaacgcaagacaagtgttttctgaaatagaagatagtaccaagcaagtcttttccaaagtattgtttaaaagtaacgaacattcagaccagctcacaagagaagaaaatactgctatacgtactccagaacatttaatatcccaaaaaggcttttcatataatgtggtaaattcatctgctttctctggatttagtacagcaagtggaaagcaagtttccattttagaaagttccttacacaaagttaagggagtgttagaggaatttgatttaatcagaactgagcatagtcttcactattcacctacgtctagacaaaatgtatcaaaaatacttcctcgtgttgataagagaaacccagagcactgtgtaaactcagaaatggaaaaaacctgcagtaaagaatttaaattatcaaataacttaaatgttgaaggtggttcttcagaaaataatcactctattaaagtttctccatatctctctcaatttcaacaagacaaacaacagttggtattaggaaccaaagtgtcacttgttgagaacattcatgttttgggaaaagaacaggcttcacctaaaaacgtaaaaatggaaattggtaaaactgaaactttttctgatgttcctgtgaaaacaaatatagaagtttgttctacttactccaaagattcagaaaactactttgaaacagaagcagtagaaattgctaaagcttttatggaagatgatgaactgacagattctaaactgccaagtcatgccacacattctctttttacatgtcccgaaaatgaggaaatggttttgtcaaattcaagaattggaaaaagaagaggagagccccttatcttagtgggagaaccctcaatcaaaagaaacttattaaatgaatttgacaggataatagaaaatcaagaaaaatccttaaaggcttcaaaaagcactccagatggcacaataaaagatcgaagattgtttatgcatcatgtttctttagagccgattacctgtgtaccctttcgcacaactaaggaacgtcaagagatacagaatccaaattttaccgcacctggtcaagaatttctgtctaaatctcatttgtatgaacatctgactttggaaaaatcttcaagcaatttagcagtttcaggacatccattttatcaagtttctgctacaagaaatgaaaaaatgagacacttgattactacaggcagaccaaccaaagtctttgttccaccttttaaaactaaatcacattttcacagagttgaacagtgtgttaggaatattaacttggaggaaaacagacaaaagcaaaacattgatggacatggctctgatgatagtaaaaataagattaatgacaatgagattcatcagtttaacaaaaacaactccaatcaagcagcagctgtaactttcacaaagtgtgaagaagaacctttagatttaattacaagtcttcagaatgccagagatatacaggatatgcgaattaagaagaaacaaaggcaacgcgtctttccacagccaggcagtctgtatcttgcaaaaacatccactctgcctcgaatctctctgaaagcagcagtaggaggccaagttccctctgcgtgttctcataaacagctgtatacgtatggcgtttctaaacattgcataaaaattaacagcaaaaatgcagagtcttttcagtttcacactgaagattattttggtaaggaaagtttatggactggaaaaggaatacagttggctgatggtggatggctcataccctccaatgatggaaaggctggaaaagaagaattttatagggctctgtgtgacactccaggtgtggatccaaagcttatttctagaatttgggtttataatcactatagatggatcatatggaaactggcagctatggaatgtgcctttcctaaggaatttgctaatagatgcctaagcccagaaagggtgcttcttcaactaaaatacagatatgatacggaaattgatagaagcagaagatcggctataaaaaagataatggaaagggatgacacagctgcaaaaacacttgttctctgtgtttctgacataatttcattgagcgcaaatatatctgaaacttctagcaataaaactagtagtgcagatacccaaaaagtggccattattgaacttacagatgggtggtatgctgttaaggcccagttagatcctcccctcttagctgtcttaaagaatggcagactgacagttggtcagaagattattcttcatggagcagaactggtgggctctcctgatgcctgtacacctcttgaagccccagaatctcttatgttaaagatttctgctaacagtactcggcctgctcgctggtataccaaacttggattctttcctgaccctagaccttttcctctgcccttatcatcgcttttcagtgatggaggaaatgttggttgtgttgatgtaattattcaaagagcataccctatacagtggatggagaagacatcatctggattatacatatttcgcaatgaaagagaggaagaaaaggaagcagcaaaatatgtggaggcccaacaaaagagactagaagccttattcactaaaattcaggaggaatttgaagaacatgaagaaaacacaacaaaaccatatttaccatcacgtgcactaacaagacagcaagttcgtgctttgcaagatggtgcagagctttatgaagcagtgaagaatgcagcagacccagcttaccttgagggttatttcagtgaagagcagttaagagccttgaataatcacaggcaaatgttgaatgataagaaacaagctcagatccagttggaaattaggaaggccatggaatctgctgaacaaaaggaacaaggtttatcaagggatgtcacaaccgtgtggaagttgcgtattgtaagctattcaaaaaaagaaaaagattcagttatactgagtatttggcgtccatcatcagatttatattctctgttaacagaaggaaagagatacagaatttatcatcttgcaacttcaaaatctaaaagtaaatctgaaagagctaacatacagttagcagcgacaaaaaaaactcagtatcaacaactaccggtttcagatgaaattttatttcagatttaccagccacgggagccccttcacttcagcaaatttttagatccagactttcagccatcttgttctgaggtggacctaataggatttgtcgtttctgttgtgaaaaaaacaggacttgcccctttcgtctatttgtcagacgaatgttacaatttactggcaataaagttttggatagaccttaatgaggacattattaagcctcatatgttaattgctgcaagcaacctccagtggcgaccagaatccaaatcaggccttcttactttatttgctggagatttttctgtgttttctgctagtccaaaagagggccactttcaagagacattcaacaaaatgaaaaatactgttgagaatattgacatactttgcaatgaagcagaaaacaagcttatgcatatactgcatgcaaatgatcccaagtggtccaccccaactaaagactgtacttcagggccgtacactgctcaaatcattcctggtacaggaaacaagcttctgatgtcttctcctaattgtgagatatattatcaaagtcctttatcactttgtatggccaaaaggaagtctgtttccacacctgtctcagcccagatgacttcaaagtcttgtaaaggggagaaagagattgatgaccaaaagaactgcaaaaagagaagagccttggatttcttgagtagactgcctttacctccacctgttagtcccatttgtacatttgtttctccggctgcacagaaggcatttcagccaccaaggagttgtggcaccaaatacgaaacacccataaagaaaaaagaactgaattctcctcagatgactccatttaaaaaattcaatgaaatttctcttttggaaagtaattcaatagctgacgaagaacttgcattgataaatacccaagctcttttgtctggttcaacaggagaaaaacaatttatatctgtcagtgaatccactaggactgctcccaccagttcagaagattatctcagactgaaacgacgttgtactacatctctgatcaaagaacaggagagttcccaggccagtacggaagaatgtgagaaaaataagcaggacacaattacaactaaaaaatatatc

SEQ ID NO: 182 - DNA, 2487 bp, Homo sapiens
  MCC
atgaattccggagttgccatgaaatatggaaacgactcctcggccgagctgagtgagctccattcagcagccctggcatcactaaagggagatatagtggaacttaataaacgtctccagcaaacagagagggaacgggaccttctggaaaagaaattggccaaggcacagtgcgagcagtcccacctcatgagagagcatgaggatgtccaggagcgaacgacgcttcgctatgaggaacgcatcacagagctccacagcgtcattgcggagctcaacaagaagatagaccgtctgcaaggcaccaccatcagggaggaagatgagtactcagaactgcgatcagaactcagccagagccaacacgaggtcaacgaggactctcgaagcatggaccaagaccagacctctgtctctatccccgaaaaccagtctaccatggttactgctgacatggacaactgcagtgacctgaactcagaactgcagagggtgctgacagggctggagaatgttgtctgcggcaggaagaagagcagctgcagcctctccgtggccgaggtggacaggcacattgagcagctcaccacagccagcgagcactgtgacctggctattaagacagtcgaggagattgagggggtgcttggccgggacctgtatcccaacctggctgaagagaggtctcggtgggagaaggagctggctgggctgagggaagagaatgagagcctgactgccatgctgtgcagcaaagaggaagaactgaaccggactaaggccaccatgaatgccatccgggaagagcgggaccggctccggaggcgggtcagagagcttcaaactcgactacagagcgtgcaggccacaggtccctccagccctggccgcctcacttccaccaaccgcccgattaaccccagcactggggagctgagcacaagcagcagcagcaatgacattcccatcgccaagattgctgagagggtgaagctatcaaagacaaggtccgaatcgtcatcatctgatcggccagtcctgggctcagaaatcagtagcataggggtatccagcagtgtggctgaacacctggcccactcacttcaggactgctccaatatccaagagattttccaaacactctactcacacggatctgccatctcagaaagcaagattagagagtttgaggtggaaacagaacggctgaatagccggattgagcacctcaaatcccaaaatgacctcctgaccataaccttggaggaatgtaaaagcaatgctgagaggatgagcatgctggtgggaaaatacgaatccaatgccacagcgctgaggctggccttgcagtacagcgagcagtgcatcgaagcctacgaactcctcctggcgctggcagagagtgagcagagcctcatcctggggcagttccgagcggcgggcgtggggtcctcccctggagaccagtcgggggatgaaaacatcactcagatgctcaagcgagctcatgactgccggaagacagctgagaacgctgccaaggccctgctcatgaagctggacggcagctgtgggggagcctttgccgtggccggctgcagcgtgcagccctgggagagcctttcctccaacagccacaccagcacaaccagctccacagccagtagttgcgacaccgagttcactaaagaagacgagcagaggctgaaggattatatccagcagctcaagaatgacagggctgcggtcaagctgaccatgctggagctggaaagcatccacatcgatcctctcagctatgacgtcaagcctcggggagacagccagaggctggatctggaaaacgcagtgcttatgcaggagctcatggccatgaaggaggagatggccgagttgaaggcccagctctacctactggagaaagagaagaaggccctggagctgaagctgagcacgcgggaggcccaggagcaggcctacctggtgcacattgagcacctgaagtccgaggtggaggagcagaaggagcagcggatgcgatccctcagctccaccagcagcggcagcaaagataaacctggcaaggagtgtgctgatgctgcctccccagctctgtccctagctgaactcaggacaacgtgcagcgagaatgagctggctgcggagttcaccaacgccattcgtcgagaaaagaagttgaaggccagagttcaagagctggtgagtgccttggagagactcaccaagagcagtgaaatccgacatcagcaatctgcagagttcgtgaatgatctaaagcgggccaacagcaacctggtggctgcctatgagaaagcaaagaaaaagcatcaaaacaaactgaagaagttagagtcgcagatgatggccatggtggagagacatgagacccaagtgaggatgctcaagcaaagaatagctctgctagaggaggagaactccaggccacacaccaatgaaacttcgctt

SEQ ID NO: 183 - DNA, 2253 bp, Homo sapiens
  EZH2, isoform 1
atgggccagactgggaagaaatctgagaagggaccagtttgttggcggaagcgtgtaaaatcagagtacatgcgactgagacagctcaagaggttcagacgagctgatgaagtaaagagtatgtttagttccaatcgtcagaaaattttggaaagaacggaaatcttaaaccaagaatggaaacagcgaaggatacagcctgtgcacatcctgacttctgtgagctcattgcgcgggactagggagtgttcggtgaccagtgacttggattttccaacacaagtcatcccattaaagactctgaatgcagttgcttcagtacccataatgtattcttggtctcccctacagcagaattttatggtggaagatgaaactgttttacataacattccttatatgggagatgaagttttagatcaggatggtactttcattgaagaactaataaaaaattatgatgggaaagtacacggggatagagaatgtgggtttataaatgatgaaatttttgtggagttggtgaatgcccttggtcaatataatgatgatgacgatgatgatgatggagacgatcctgaagaaagagaagaaaagcagaaagatctggaggatcaccgagatgataaagaaagccgcccacctcggaaatttccttctgataaaatttttgaagccatttcctcaatgtttccagataagggcacagcagaagaactaaaggaaaaatataaagaactcaccgaacagcagctcccaggcgcacttcctcctgaatgtacccccaacatagatggaccaaatgctaaatctgttcagagagagcaaagcttacactcctttcatacgcttttctgtaggcgatgttttaaatatgactgcttcctacatcgtaagtgcaattattcttttcatgcaacacccaacacttataagcggaagaacacagaaacagctctagacaacaaaccttgtggaccacagtgttaccagcatttggagggagcaaaggagtttgctgctgctctcaccgctgagcggataaagaccccaccaaaacgtccaggaggccgcagaagaggacggcttcccaataacagtagcaggcccagcacccccaccattaatgtgctggaatcaaaggatacagacagtgatagggaagcagggactgaaacggggggagagaacaatgataaagaagaagaagagaagaaagatgaaacttcgagctcctctgaagcaaattctcggtgtcaaacaccaataaagatgaagccaaatattgaacctcctgagaatgtggagtggagtggtgctgaagcctcaatgtttagagtcctcattggcacttactatgacaatttctgtgccattgctaggttaattgggaccaaaacatgtagacaggtgtatgagtttagagtcaaagaatctagcatcatagctccagctcccgctgaggatgtggatactcctccaaggaaaaagaagaggaaacaccggttgtgggctgcacactgcagaaagatacagctgaaaaaggacggctcctctaaccatgtttacaactatcaaccctgtgatcatccacggcagccttgtgacagttcgtgcccttgtgtgatagcacaaaatttttgtgaaaagttttgtcaatgtagttcagagtgtcaaaaccgctttccgggatgccgctgcaaagcacagtgcaacaccaagcagtgcccgtgctacctggctgtccgagagtgtgaccctgacctctgtcttacttgtggagccgctgaccattgggacagtaaaaatgtgtcctgcaagaactgcagtattcagcggggctccaaaaagcatctattgctggcaccatctgacgtggcaggctgggggatttttatcaaagatcctgtgcagaaaaatgaattcatctcagaatactgtggagagattatttctcaagatgaagctgacagaagagggaaagtgtatgataaatacatgtgcagctttctgttcaacttgaacaatgattttgtggtggatgcaacccgcaagggtaacaaaattcgttttgcaaatcattcggtaaatccaaactgctatgcaaaagttatgatggttaacggtgatcacaggataggtatttttgccaagagagccatccagactggcgaagagctgttttttgattacagatacagccaggctgatgccctgaagtatgtcggcatcgaaagagaaatggaaatccct

SEQ ID NO: 184 - DNA, 1053 bp, Homo sapiens
  NIPP1/PPP1R8, isoform alpha
atggcggcagccgcgaactccggctctagcctcccgctgttcgactgcccaacctgggcaggtaagccccctcccggtttacatctggatgtagtcaaaggagacaaactaattgagaaactgattattgatgagaagaagtattacttatttgggagaaaccctgatttgtgtgactttaccattgaccaccagtcttgctctcgggtccatgctgcacttgtctaccacaagcatctgaagagagttttcctgatagatctcaacagtacacacggcactttcttgggtcacattcggttggaacctcacaagcctcagcaaattcccatcgattccacggtctcatttggcgcatccacaagggcatacactctgcgcgagaagcctcagacattgccatcggctgtgaaaggagatgagaagatgggtggagaggatgatgaactcaagggcttactggggcttccagaggaggaaactgagcttgataacctgacagagttcaacactgcccacaacaagcggatttctacccttaccattgaggagggaaatctggacattcaaagaccaaagaggaagaggaagaactcacgggtgacattcagtgaggatgatgagatcatcaacccagaggatgtggatccctcagttggtcgattcaggaacatggtgcaaactgcagtggtcccagtcaagaagaagcgtgtggagggccctggctccctgggcctggaggaatcagggagcaggcgcatgcagaactttgccttcagcggaggactctacgggggcctgccccccacacacagtgaagcaggctcccagccacatggcatccatgggacagcactcatcggtggcttgcccatgccatacccaaaccttgcccctgatgtggacttgactcctgttgtgccgtcagcagtgaacatgaaccctgcaccaaaccctgcagtctataaccctgaagctgtaaatgaacccaagaagaagaaatatgcaaaagaggcttggccaggcaagaagcccacaccttccttgctgatt

SEQ ID NO: 185 - DNA, 990 bp, Homo sapiens
  PPP1CA, isoform 1
atgtccgacagcgagaagctcaacctggactcgatcatcgggcgcctgctggaagtgcagggctcgcggcctggcaagaatgtacagctgacagagaacgagatccgcggtctgtgcctgaaatcccgggagatttttctgagccagcccattcttctggagctggaggcacccctcaagatctgcggtgacatacacggccagtactacgaccttctgcgactatttgagtatggcggtttccctcccgagagcaactacctctttctgggggactatgtggacaggggcaagcagtccttggagaccatctgcctgctgctggcctataagatcaagtaccccgagaacttcttcctgctccgtgggaaccacgagtgtgccagcatcaaccgcatctatggtttctacgatgagtgcaagagacgctacaacatcaaactgtggaaaaccttcactgactgcttcaactgcctgcccatcgcggccatagtggacgaaaagatcttctgctgccacggaggcctgtccccggacctgcagtctatggagcagattcggcggatcatgcggcccacagatgtgcctgaccagggcctgctgtgtgacctgctgtggtctgaccctgacaaggacgtgcagggctggggcgagaacgaccgtggcgtctcttttacctttggagccgaggtggtggccaagttcctccacaagcacgacttggacctcatctgccgagcacaccaggtggtagaagacggctacgagttctttgccaagcggcagctggtgacacttttctcagctcccaactactgtggcgagtttgacaatgctggcgccatgatgagtgtggacgagaccctcatgtgctctttccagatcctcaagcccgccgacaagaacaaggggaagtacgggcagttcagtggcctgaaccctggaggccgacccatcaccccaccccgcaattccgccaaagccaagaaa

SEQ ID NO: 186 - DNA, 1818 bp, Homo sapiens
  TAK1/MAP3K7, isoform 1B
atgtctacagcctctgccgcctcctcctcctcctcgtcttcggccggtgagatgatcgaagccccttcccaggtcctcaactttgaagagatcgactacaaggagatcgaggtggaagaggttgttggaagaggagcctttggagttgtttgcaaagctaagtggagagcaaaagatgttgctattaaacaaatagaaagtgaatctgagaggaaagcgtttattgtagagcttcggcagttatcccgtgtgaaccatcctaatattgtaaagctttatggagcctgcttgaatccagtgtgtcttgtgatggaatatgctgaagggggctctttatataatgtgctgcatggtgctgaaccattgccatattatactgctgcccacgcaatgagttggtgtttacagtgttcccaaggagtggcttatcttcacagcatgcaacccaaagcgctaattcacagggacctgaaaccaccaaacttactgctggttgcaggggggacagttctaaaaatttgtgattttggtacagcctgtgacattcagacacacatgaccaataacaaggggagtgctgcttggatggcacctgaagtttttgaaggtagtaattacagtgaaaaatgtgacgtcttcagctggggtattattctttgggaagtgataacgcgtcggaaaccctttgatgagattggtggcccagctttccgaatcatgtgggctgttcataatggtactcgaccaccactgataaaaaatttacctaagcccattgagagcctgatgactcgttgttggtctaaagatccttcccagcgcccttcaatggaggaaattgtgaaaataatgactcacttgatgcggtactttccaggagcagatgagccattacagtatccttgtcagtattcagatgaaggacagagcaactctgccaccagtacaggctcattcatggacattgcttctacaaatacgagtaacaaaagtgacactaatatggagcaagttcctgccacaaatgatactattaagcgcttagaatcaaaattgttgaaaaatcaggcaaagcaacagagtgaatctggacgtttaagcttgggagcctcccgtgggagcagtgtggagagcttgcccccaacctctgagggcaagaggatgagtgctgacatgtctgaaatagaagctaggatcgccgcaaccacagcctattccaagcctaaacggggccaccgtaaaactgcttcatttggcaacattctggatgtccctgagatcgtcatatcaggcaacggacagccaagacgtagatccatccaagacttgactgtaactggaacagaacctggtcaggtgagcagtaggtcatccagtcccagtgtcagaatgattactacctcaggaccaacctcagaaaagccaactcgaagtcatccatggacccctgatgattccacagataccaatggatcagataactccatcccaatggcttatcttacactggatcaccaactacagcctctagcaccgtgcccaaactccaaagaatctatggcagtgtttgaacagcattgtaaaatggcacaagaatatatgaaagttcaaacagaaattgcattgttattacagagaaagcaagaactagttgcagaactggaccaggatgaaaaggaccagcaaaatacatctcgcctggtacaggaacataaaaagcttttagatgaaaacaaaagcctttctacttactaccagcaatgcaaaaaacaactagaggtcatcagaagtcagcagcagaaacgacaaggcacttca

SEQ ID NO: 187 - DNA, 204 bp, Unknown
  CMV promoter
gtgatgcggttttggcagtacatcaatgggcgtggatagcggtttgactcacggggatttccaagtctccaccccattgacgtcaatgggagtttgttttggcaccaaaatcaacgggactttccaaaatgtcgtaacaactccgccccattgacgcaaatgggcggtaggcgtgtacggtgggaggtctatataagcagagct

SEQ ID NO: 188 - DNA, 1212 bp, Homo sapiens
  Caspase-1, isoform alpha
atggccgacaaggtcctgaaggagaagagaaagctgtttatccgttccatgggtgaaggtacaataaatggcttactggatgaattattacagacaagggtgctgaacaaggaagagatggagaaagtaaaacgtgaaaatgctacagttatggataagacccgagctttgattgactccgttattccgaaaggggcacaggcatgccaaatttgcatcacatacatttgtgaagaagacagttacctggcagggacgctgggactctcagcagatcaaacatctggaaattaccttaatatgcaagactctcaaggagtactttcttcctttccagctcctcaggcagtgcaggacaacccagctatgcccacatcctcaggctcagaagggaatgtcaagctttgctccctagaagaagctcaaaggatatggaaacaaaagtcggcagagatttatccaataatggacaagtcaagccgcacacgtcttgctctcattatctgcaatgaagaatttgacagtattcctagaagaactggagctgaggttgacatcacaggcatgacaatgctgctacaaaatctggggtacagcgtagatgtgaaaaaaaatctcactgcttcggacatgactacagagctggaggcatttgcacaccgcccagagcacaagacctctgacagcacgttcctggtgttcatgtctcatggtattcgggaaggcatttgtgggaagaaacactctgagcaagtcccagatatactacaactcaatgcaatctttaacatgttgaataccaagaactgcccaagtttgaaggacaaaccgaaggtgatcatcatccaggcctgccgtggtgacagccctggtgtggtgtggtttaaagattcagtaggagtttctggaaacctatctttaccaactacagaagagtttgaggatgatgctattaagaaagcccacatagagaaggattttatcgctttctgctcttccacaccagataatgtttcttggagacatcccacaatgggctctgtttttattggaagactcattgaacatatgcaagaatatgcctgttcctgtgatgtggaggaaattttccgcaaggttcgattttcatttgagcagccagatggtagagcgcagatgcccaccactgaaagagtgactttgacaagatgtttctacctcttcccaggacat

SEQ ID NO: 189 - DNA, 885 bp, Homo sapiens
  cyclin-D1/CCND1
atggaacaccagctcctgtgctgcgaagtggaaaccatccgccgcgcgtaccccgatgccaacctcctcaacgaccgggtgctgcgggccatgctgaaggcggaggagacctgcgcgccctcggtgtcctacttcaaatgtgtgcagaaggaggtcctgccgtccatgcggaagatcgtcgccacctggatgctggaggtctgcgaggaacagaagtgcgaggaggaggtcttcccgctggccatgaactacctggaccgcttcctgtcgctggagcccgtgaaaaagagccgcctgcagctgctgggggccacttgcatgttcgtggcctctaagatgaaggagaccatccccctgacggccgagaagctgtgcatctacaccgacaactccatccggcccgaggagctgctgcaaatggagctgctcctggtgaacaagctcaagtggaacctggccgcaatgaccccgcacgatttcattgaacacttcctctccaaaatgccagaggcggaggagaacaaacagatcatccgcaaacacgcgcagaccttcgttgccctctgtgccacagatgtgaagttcatttccaatccgccctccatggtggcagcggggagcgtggtggccgcagtgcaaggcctgaacctgaggagccccaacaacttcctgtcctactaccgcctcacacgcttcctctccagagtgatcaagtgtgacccggactgcctccgggcctgccaggagcagatcgaagccctgctggagtcaagcctgcgccaggcccagcagaacatggaccccaaggccgccgaggaggaggaagaggaggaggaggaggtggacctggcttgcacacccaccgacgtgcgggacgtggacatc

SEQ ID NO: 190 - DNA, 996 bp, Homo sapiens
  A2b receptor (ADORA2B)
atgctgctggagacacaggacgcgctgtacgtggcgctggagctggtcatcgccgcgctttcggtggcgggcaacgtgctggtgtgcgccgcggtgggcacggcgaacactctgcagacgcccaccaactacttcctggtgtccctggctgcggccgacgtggccgtggggctcttcgccatcccctttgccatcaccatcagcctgggcttctgcactgacttctacggctgcctcttcctcgcctgcttcgtgctggtgctcacgcagagctccatcttcagccttctggccgtggcagtcgacagatacctggccatctgtgtcccgctcaggtataaaagtttggtcacggggacccgagcaagaggggtcattgctgtcctctgggtccttgcctttggcatcggattgactccattcctggggtggaacagtaaagacagtgccaccaacaactgcacagaaccctgggatggaaccacgaatgaaagctgctgccttgtgaagtgtctctttgagaatgtggtccccatgagctacatggtatatttcaatttctttgggtgtgttctgcccccactgcttataatgctggtgatctacattaagatcttcctggtggcctgcaggcagcttcagcgcactgagctgatggaccactcgaggaccaccctccagcgggagatccatgcagccaagtcactggccatgattgtggggatttttgccctgtgctggttacctgtgcatgctgttaactgtgtcactcttttccagccagctcagggtaaaaataagcccaagtgggcaatgaatatggccattcttctgtcacatgccaattcagttgtcaatcccattgtctatgcttaccggaaccgagacttccgctacacttttcacaaaattatctccaggtatcttctctgccaagcagatgtcaagagtgggaatggtcaggctggggtacagcctgctctcggtgtgggccta

SEQ ID NO: 191 - DNA, 1242 bp, Homo sapiens
  HHLA2, isoform 1
atgaaggcacagacagcactgtctttcttcctcattctcataacatctctgagtggatctcaaggcatattccctttggctttcttcatttatgttcctatgaatgaacaaatcgtcattggaagacttgatgaagatataattctcccttcttcatttgagaggggatccgaagtcgtaatacactggaagtatcaagatagctataaggttcacagttactacaaaggcagtgaccatttggaaagccaagatcccagatatgcaaacaggacatcccttttctataatgagattcaaaatgggaatgcgtcgctatttttcagaagagtaagccttctggacgaaggaatttacacctgctatgtaggaacagcaattcaagtgattacaaacaaagtggtgctaaaggtgggagtttttctcacacccgtgatgaagtatgaaaagaggaacacaaacagcttcttaatatgcagcgtgttaagtgtttatcctcgtccaattatcacgtggaaaatggacaacacacctatctctgaaaacaacatggaagaaacagggtctttggattctttttctattaacagcccactgaatattacaggatcaaattcatcttatgaatgtacaattgaaaattcactgctgaagcaaacatggacagggcgctggacgatgaaagatggccttcataaaatgcaaagtgaacacgtttcactctcatgtcaacctgtaaatgattatttttcaccaaaccaagacttcaaagttacttggtccagaatgaaaagtgggactttctctgtcctggcttactatctgagctcctcacaaaatacaattatcaatgaatcccgattctcatggaacaaagagctgataaaccagagtgacttctctatgaatttgatggatcttaatctttcagacagtggggaatatttatgcaatatttcttcggatgaatatactttacttaccatccacacagtgcatgtagaaccgagccaagaaacagcttcccataacaaaggcttatggattttggtgccctctgcgattttggcagcttttctgctgatttggagcgtaaaatgttgcagagcccagctagaagccaggaggagcagacaccctgctgatggagcccaacaagaaagatgttgtgtccctcctggtgagcgctgtcccagtgcacccgataatggcgaagaaaatgtgcctctttcaggaaaagta

SEQ ID NO: 192 - DNA, 1128 bp, Herpes simplex
  herpes simplex virus thymidine kinase (HSV-TK)
atggcttcgtacccctgccatcaacacgcgtctgcgttcgaccaggctgcgcgttctcgcggccatagcaaccgacgtacggcgttgcgccctcgccggcagcaagaagccacggaagtccgcctggagcagaaaatgcccacgctactgcgggtttatatagacggtcctcacgggatggggaaaaccaccaccacgcaactgctggtggccctgggttcgcgcgacgatatcgtctacgtacccgagccgatgacttactggcaggtgctgggggcttccgagacaatcgcgaacatctacaccacacaacaccgcctcgaccagggtgagatatcggccggggacgcggcggtggtaatgacaagcgcccagataacaatgggcatgccttatgccgtgaccgacgccgttctggctcctcatgtcgggggggaggctgggagttcacatgccccgcccccggccctcaccctcatcttcgaccgccatcccatcgccgccctcctgtgctacccggccgcgcgataccttatgggcagcatgaccccccaggccgtgctggcgttcgtggccctcatcccgccgaccttgcccggcacaaacatcgtgttgggggcccttccggaggacagacacatcgaccgcctggccaaacgccagcgccccggcgagcggcttgacctggctatgctggccgcgattcgccgcgtttacgggctgcttgccaatacggtgcggtatctgcagggcggcgggtcgtggtgggaggattggggacagctttcggggacggccgtgccgccccagggtgccgagccccagagcaacgcgggcccacgaccccatatcggggacacgttatttaccctgtttcgggcccccgagttgctggcccccaacggcgacctgtataacgtgtttgcctgggccttggacgtcttggccaaacgcctccgtcccatgcacgtctttatcctggattacgaccaatcgcccgccggctgccgggacgccctgctgcaacttacctccgggatggtccagacccacgtcaccaccccaggctccataccgacgatctgcgacctggcgcgcacgtttgcccgggagatgggggaggctaac

SEQ ID NO: 193 - DNA, 1173 bp, Homo sapiens
  Human TGF-beta isoform 1
atgccgccctccgggctgcggctgctgccgctgctgctaccgctgctgtggctactggtgctgacgcctggccggccggccgcgggactatccacctgcaagactatcgacatggagctggtgaagcggaagcgcatcgaggccatccgcggccagatcctgtccaagctgcggctcgccagccccccgagccagggggaggtgccgcccggcccgctgcccgaggccgtgctcgccctgtacaacagcacccgcgaccgggtggccggggagagtgcagaaccggagcccgagcctgaggccgactactacgccaaggaggtcacccgcgtgctaatggtggaaacccacaacgaaatctatgacaagttcaagcagagtacacacagcatatatatgttcttcaacacatcagagctccgagaagcggtacctgaacccgtgttgctctcccgggcagagctgcgtctgctgaggctcaagttaaaagtggagcagcacgtggagctgtaccagaaatacagcaacaattcctggcgatacctcagcaaccggctgctggcacccagcgactcgccagagtggttatcttttgatgtcaccggagttgtgcggcagtggttgagccgtggaggggaaattgagggctttcgccttagcgcccactgctcctgtgacagcagggataacacactgcaagtggacatcaacgggttcactaccggccgccgaggtgacctggccaccattcatggcatgaaccggcctttcctgcttctcatggccaccccgctggagagggcccagcatctgcaaagctcccggcaccgccgagccctggacaccaactattgcttcagctccacggagaagaactgctgcgtgcggcagctgtacattgacttccgcaaggacctcggctggaagtggatccacgagcccaagggctaccatgccaacttctgcctcgggccctgcccctacatttggagcctggacacgcagtacagcaaggtcctggccctgtacaaccagcataacccgggcgcctcggcggcgccgtgctgcgtgccgcaggcgctggagccgctgcccatcgtgtactacgtgggccgcaagcccaaggtggagcagctgtccaacatgatcgtgcgctcctgcaagtgcagctga

SEQ ID NO: 194 - DNA, 699 bp, Homo sapiens
  Human VEGF
atgaactttctgctgtcttgggtgcattggagccttgccttgctgctctacctccaccatgccaagtggtcccaggctgcacccatggcagaaggaggagggcagaatcatcacgaagtggtgaagttcatggatgtctatcagcgcagctactgccatccaatcgagaccctggtggacatcttccaggagtaccctgatgagatcgagtacatcttcaagccatcctgtgtgcccctgatgcgatgcgggggctgctgcaatgacgagggcctggagtgtgtgcccactgaggagtccaacatcaccatgcagattatgcggatcaaacctcaccaaggccagcacataggagagatgagcttcctacagcacaacaaatgtgaatgcagaccaaagaaagatagagcaagacaagaaaaaaaatcagttcgaggaaagggaaaggggcaaaaacgaaagcgcaagaaatcccggtataagtcctggagcgtgtacgttggtgcccgctgctgtctaatgccctggagcctccctggcccccatccctgtgggccttgctcagagcggagaaagcatttgtttgtacaagatccgcagacgtgtaaatgttcctgcaaaaacacagactcgcgttgcaaggcgaggcagcttgagttaaacgaacgtacttgcagatgtgacaagccgaggcggtga

SEQ ID NO: 195 - DNA, 19 bp, Homo sapiens
  Human TGF-beta isoform 1 shRNA target 1
gaaacccacaacgaaatct

SEQ ID NO: 196 - DNA, 19 bp, Homo sapiens
  Human TGF-beta isoform1 shRNA target 2
gtacacacagcatatatat

SEQ ID NO: 197 - DNA, 19 bp, Homo sapiens
  Human TGF-beta isoform1 shRNA target 3
ctgctgaggctcaagttaa

SEQ ID NO: 198 - DNA, 19 bp, Homo sapiens
  Human TGF-beta isoform1 shRNA target 4
gtggagctgtaccagaaat

SEQ ID NO: 199 - DNA, 19 bp, Homo sapiens
  Human TGF-beta isoform1 shRNA target 5
gactcgccagagtggttat

SEQ ID NO: 200 - DNA, 19 bp, Homo sapiens
  Human TGF-beta isoform1 shRNA target 6
gagccgtggaggggaaatt

SEQ ID NO: 201 - DNA, 19 bp, Homo sapiens
  Human TGF-beta isoform1 shRNA target 7
cctgtgacagcagggataa

SEQ ID NO: 202 - DNA, 19 bp, Homo sapiens
  Human TGF-beta isoform1 shRNA target 8
gccctggacaccaactatt

SEQ ID NO: 203 - DNA, 19 bp, Homo sapiens
  Human TGF-beta isoform1 shRNA target 9
ccctgtacaaccagcataa

SEQ ID NO: 204 - DNA, 19 bp, Homo sapiens
  Human VEGF shRNA target 1
gagatcgagtacatcttca

SEQ ID NO: 205 - DNA, 19 bp, Homo sapiens
  Human VEGF shRNA target 2
gcagattatgcggatcaaa

SEQ ID NO: 206 - DNA, 19 bp, Homo sapiens
  Human VEGF shRNA target 3
gatagagcaagacaagaaa

SEQ ID NO: 207 - DNA, 19 bp, Homo sapiens
  Human VEGF shRNA target 4
ggagaaagcatttgtttgt

SEQ ID NO: 208 - DNA, 19 bp, Homo sapiens
  Human VEGF shRNA target 5
gatccgcagacgtgtaaat

SEQ ID NO: 209 - DNA, 19 bp, Homo sapiens
  Human VEGF shRNA target 6
gcgaggcagcttgagttaa

SEQ ID NO: 210 - DNA, 3888 bp, Artificial Sequence
  ARI-134
ctttcctgcgttatcccctgattctgtggataaccgtattaccgcctttgagtgagctgataccgctcgccgcagccgaacgaccgagcgcagcgagtcagtgagcgaggaagcggaagagcgcccaatacgcaaaccgcctctccccgcgcgttggccgattcattaatgcagctggcacgacaggtttcccgactggaaagcgggcagtgagcgcaacgcaattaatacgcgtaccgctagccaggaagagtttgtagaaacgcaaaaaggccatccgtcaggatggccttctgcttagtttgatgcctggcagtttatggcgggcgtcctgcccgccaccctccgggccgttgcttcacaacgttcaaatccgctcccggcggatttgtcctactcaggagagcgttcaccgacaaacaacagataaaacgaaaggcccagtcttccgactgagcctttcgttttatttgatgcctggcagttccctactctcgcgttaacgctagcatggatgttttcccagtcacgacgttgtaaaacgacggccagtcttaagctcgggccccaaataatgattttattttgactgatagtgacctgttcgttgcaacaaattgatgagcaatgcttttttataatgccaactttgtacaaaaaagcaggctttaaaggaaccaattcagtcgagaattggtaccatatttgcatgtcgctatgtgttctgggaaatcaccataaacgtgaaatgtctttggatttgggaatcttataagttctgtatgagaccactccctaggccacactgtatggactattctagagatagtccatacagtgtggcttttttcgacagatctggcgcgccatagtggccagcggccgcaggtaagccagcccaggcctcgccctccagctcaaggcgggacaggtgccctagagtagcctgcatccagggacaggccccagccgggtgctgacacgtccacctccatctcttcctcaggtctgcccgggtggcatccctgtgacccctccccagtgcctctcctggccctggaagttgccactccagtgcccaccagccttgtcctaataaaattaagttgcatcattttgtctgactaggtgtccttctataatattatggggtggaggggggtggtatggagcaaggggcccaagttaacttgtttattgcagcttataatggttacaaataaagcaatagcatcacaaatttcacaaataaagcatttttttcactgcattctagttgtggtttgtccaaactcatcaatgtatcttatcatgtctggatccaaggtcgggcaggaagagggcctatttcccatgattccttcatatttgcatatacgatacaaggctgttagagagataattagaattaatttgactgtaaacacaaagatattagtacaaaatacgtgacgtagaaagtaataatttcttgggtagtttgcagttttaaaattatgttttaaaatggactatcatatgcttaccgtaacttgaaagtatttcgatttcttggctttatatatcttgtggaaaggacgaaactaggccgactacaagcgaattatctagagtaattcgcttgtagtcggcttttttcgagtagctagagaattcatggtaatagcgatgactaatacgtagatgtactgccaagtaggaaagtcccataaggtcatgtactgggcataatgccaggcgggccatttaccgtcattgacgtcaatagggggcgtacttggcatatgatacacttgatgtactgccaagtgggcagtttaccgtaaatagtccacccattgacgtcaatggaaagtccctattggcgttactatgggaacatacgtcattattgacgtcaatgggcgggggtcgttgggcggtcagccaggcgggccatttaccgtaagttatgtaacgcggaactccatatatgggctatgaactaatgaccccgtaattgattactattaataactagacccagctttcttgtacaaagttggcattataagaaagcattgcttatcaatttgttgcaacgaacaggtcactatcagtcaaaataaaatcattatttgccatccagctgatatcccctatagtgagtcgtattacatggtcatagctgtttcctggcagctctggcccgtgtctcaaaatctctgatgttacattgcacaagataaaaatatatcatcatgaacaataaaactgtctgcttacataaacagtaatacaaggggtgttatgagccatattcaacgggaaacgtcgaggccgcgattaaattccaacatggatgctgatttatatgggtataaatgggctcgcgataatgtcgggcaatcaggtgcgacaatctatcgcttgtatgggaagcccgatgcgccagagttgtttctgaaacatggcaaaggtagcgttgccaatgatgttacagatgagatggtcagactaaactggctgacggaatttatgcctcttccgaccatcaagcattttatccgtactcctgatgatgcatggttactcaccactgcgatccccggaaaaacagcattccaggtattagaagaatatcctgattcaggtgaaaatattgttgatgcgctggcagtgttcctgcgccggttgcattcgattcctgtttgtaattgtccttttaacagcgatcgcgtatttcgtctcgctcaggcgcaatcacgaatgaataacggtttggttgatgcgagtgattttgatgacgagcgtaatggctggcctgttgaacaagtctggaaagaaatgcataaacttttgccattctcaccggattcagtcgtcactcatggtgatttctcacttgataaccttatttttgacgaggggaaattaataggttgtattgatgttggacgagtcggaatcgcagaccgataccaggatcttgccatcctatggaactgcctcggtgagttttctccttcattacagaaacggctttttcaaaaatatggtattgataatcctgatatgaataaattgcagtttcatttgatgctcgatgagtttttctaatcagaattggttaattggttgtaacactggcagagcattacgctgacttgacgggacggcgcaagctcatgaccaaaatcccttaacgtgagttacgcgtcgttccactgagcgtcagaccccgtagaaaagatcaaaggatcttcttgagatcctttttttctgcgcgtaatctgctgcttgcaaacaaaaaaaccaccgctaccagcggtggtttgtttgccggatcaagagctaccaactctttttccgaaggtaactggcttcagcagagcgcagataccaaatactgtccttctagtgtagccgtagttaggccaccacttcaagaactctgtagcaccgcctacatacctcgctctgctaatcctgttaccagtggctgctgccagtggcgataagtcgtgtcttaccgggttggactcaagacgatagttaccggataaggcgcagcggtcgggctgaacggggggttcgtgcacacagcccagcttggagcgaacgacctacaccgaactgagatacctacagcgtgagcattgagaaagcgccacgcttcccgaagggagaaaggcggacaggtatccggtaagcggcagggtcggaacaggagagcgcacgagggagcttccagggggaaacgcctggtatctttatagtcctgtcgggtttcgccacctctgacttgagcgtcgatttttgtgatgctcgtcaggggggcggagcctatggaaaaacgccagcaacgcggcctttttacggttcctggccttttgctggccttttgct

SEQ ID NO: 211 - DNA, 3888 bp, Artificial Sequence
  ARI-135
ctttcctgcgttatcccctgattctgtggataaccgtattaccgcctttgagtgagctgataccgctcgccgcagccgaacgaccgagcgcagcgagtcagtgagcgaggaagcggaagagcgcccaatacgcaaaccgcctctccccgcgcgttggccgattcattaatgcagctggcacgacaggtttcccgactggaaagcgggcagtgagcgcaacgcaattaatacgcgtaccgctagccaggaagagtttgtagaaacgcaaaaaggccatccgtcaggatggccttctgcttagtttgatgcctggcagtttatggcgggcgtcctgcccgccaccctccgggccgttgcttcacaacgttcaaatccgctcccggcggatttgtcctactcaggagagcgttcaccgacaaacaacagataaaacgaaaggcccagtcttccgactgagcctttcgttttatttgatgcctggcagttccctactctcgcgttaacgctagcatggatgttttcccagtcacgacgttgtaaaacgacggccagtcttaagctcgggccccaaataatgattttattttgactgatagtgacctgttcgttgcaacaaattgatgagcaatgcttttttataatgccaactttgtacaaaaaagcaggctttaaaggaaccaattcagtcgagaattggtaccatatttgcatgtcgctatgtgttctgggaaatcaccataaacgtgaaatgtctttggatttgggaatcttataagttctgtatgagaccactccctaggagctggctcctggtgaattctagagattcaccaggagccagctcttttttcgacagatctggcgcgccatagtggccagcggccgcaggtaagccagcccaggcctcgccctccagctcaaggcgggacaggtgccctagagtagcctgcatccagggacaggccccagccgggtgctgacacgtccacctccatctcttcctcaggtctgcccgggtggcatccctgtgacccctccccagtgcctctcctggccctggaagttgccactccagtgcccaccagccttgtcctaataaaattaagttgcatcattttgtctgactaggtgtccttctataatattatggggtggaggggggtggtatggagcaaggggcccaagttaacttgtttattgcagcttataatggttacaaataaagcaatagcatcacaaatttcacaaataaagcatttttttcactgcattctagttgtggtttgtccaaactcatcaatgtatcttatcatgtctggatccaaggtcgggcaggaagagggcctatttcccatgattccttcatatttgcatatacgatacaaggctgttagagagataattagaattaatttgactgtaaacacaaagatattagtacaaaatacgtgacgtagaaagtaataatttcttgggtagtttgcagttttaaaattatgttttaaaatggactatcatatgcttaccgtaacttgaaagtatttcgatttcttggctttatatatcttgtggaaaggacgaaactaggccgactacaagcgaattatctagagtaattcgcttgtagtcggcttttttcgagtagctagagaattcatggtaatagcgatgactaatacgtagatgtactgccaagtaggaaagtcccataaggtcatgtactgggcataatgccaggcgggccatttaccgtcattgacgtcaatagggggcgtacttggcatatgatacacttgatgtactgccaagtgggcagtttaccgtaaatagtccacccattgacgtcaatggaaagtccctattggcgttactatgggaacatacgtcattattgacgtcaatgggcgggggtcgttgggcggtcagccaggcgggccatttaccgtaagttatgtaacgcggaactccatatatgggctatgaactaatgaccccgtaattgattactattaataactagacccagctttcttgtacaaagttggcattataagaaagcattgcttatcaatttgttgcaacgaacaggtcactatcagtcaaaataaaatcattatttgccatccagctgatatcccctatagtgagtcgtattacatggtcatagctgtttcctggcagctctggcccgtgtctcaaaatctctgatgttacattgcacaagataaaaatatatcatcatgaacaataaaactgtctgcttacataaacagtaatacaaggggtgttatgagccatattcaacgggaaacgtcgaggccgcgattaaattccaacatggatgctgatttatatgggtataaatgggctcgcgataatgtcgggcaatcaggtgcgacaatctatcgcttgtatgggaagcccgatgcgccagagttgtttctgaaacatggcaaaggtagcgttgccaatgatgttacagatgagatggtcagactaaactggctgacggaatttatgcctcttccgaccatcaagcattttatccgtactcctgatgatgcatggttactcaccactgcgatccccggaaaaacagcattccaggtattagaagaatatcctgattcaggtgaaaatattgttgatgcgctggcagtgttcctgcgccggttgcattcgattcctgtttgtaattgtccttttaacagcgatcgcgtatttcgtctcgctcaggcgcaatcacgaatgaataacggtttggttgatgcgagtgattttgatgacgagcgtaatggctggcctgttgaacaagtctggaaagaaatgcataaacttttgccattctcaccggattcagtcgtcactcatggtgatttctcacttgataaccttatttttgacgaggggaaattaataggttgtattgatgttggacgagtcggaatcgcagaccgataccaggatcttgccatcctatggaactgcctcggtgagttttctccttcattacagaaacggctttttcaaaaatatggtattgataatcctgatatgaataaattgcagtttcatttgatgctcgatgagtttttctaatcagaattggttaattggttgtaacactggcagagcattacgctgacttgacgggacggcgcaagctcatgaccaaaatcccttaacgtgagttacgcgtcgttccactgagcgtcagaccccgtagaaaagatcaaaggatcttcttgagatcctttttttctgcgcgtaatctgctgcttgcaaacaaaaaaaccaccgctaccagcggtggtttgtttgccggatcaagagctaccaactctttttccgaaggtaactggcttcagcagagcgcagataccaaatactgtccttctagtgtagccgtagttaggccaccacttcaagaactctgtagcaccgcctacatacctcgctctgctaatcctgttaccagtggctgctgccagtggcgataagtcgtgtcttaccgggttggactcaagacgatagttaccggataaggcgcagcggtcgggctgaacggggggttcgtgcacacagcccagcttggagcgaacgacctacaccgaactgagatacctacagcgtgagcattgagaaagcgccacgcttcccgaagggagaaaggcggacaggtatccggtaagcggcagggtcggaacaggagagcgcacgagggagcttccagggggaaacgcctggtatctttatagtcctgtcgggtttcgccacctctgacttgagcgtcgatttttgtgatgctcgtcaggggggcggagcctatggaaaaacgccagcaacgcggcctttttacggttcctggccttttgctggccttttgct

SEQ ID NO: 212 - DNA, 3888 bp, Artificial Sequence
  ARI-136
ctttcctgcgttatcccctgattctgtggataaccgtattaccgcctttgagtgagctgataccgctcgccgcagccgaacgaccgagcgcagcgagtcagtgagcgaggaagcggaagagcgcccaatacgcaaaccgcctctccccgcgcgttggccgattcattaatgcagctggcacgacaggtttcccgactggaaagcgggcagtgagcgcaacgcaattaatacgcgtaccgctagccaggaagagtttgtagaaacgcaaaaaggccatccgtcaggatggccttctgcttagtttgatgcctggcagtttatggcgggcgtcctgcccgccaccctccgggccgttgcttcacaacgttcaaatccgctcccggcggatttgtcctactcaggagagcgttcaccgacaaacaacagataaaacgaaaggcccagtcttccgactgagcctttcgttttatttgatgcctggcagttccctactctcgcgttaacgctagcatggatgttttcccagtcacgacgttgtaaaacgacggccagtcttaagctcgggccccaaataatgattttattttgactgatagtgacctgttcgttgcaacaaattgatgagcaatgcttttttataatgccaactttgtacaaaaaagcaggctttaaaggaaccaattcagtcgagaattggtaccatatttgcatgtcgctatgtgttctgggaaatcaccataaacgtgaaatgtctttggatttgggaatcttataagttctgtatgagaccactccctaggcagctggaattctttctatctagagtagaaagaattccagctgcttttttcgacagatctggcgcgccatagtggccagcggccgcaggtaagccagcccaggcctcgccctccagctcaaggcgggacaggtgccctagagtagcctgcatccagggacaggccccagccgggtgctgacacgtccacctccatctcttcctcaggtctgcccgggtggcatccctgtgacccctccccagtgcctctcctggccctggaagttgccactccagtgcccaccagccttgtcctaataaaattaagttgcatcattttgtctgactaggtgtccttctataatattatggggtggaggggggtggtatggagcaaggggcccaagttaacttgtttattgcagcttataatggttacaaataaagcaatagcatcacaaatttcacaaataaagcatttttttcactgcattctagttgtggtttgtccaaactcatcaatgtatcttatcatgtctggatccaaggtcgggcaggaagagggcctatttcccatgattccttcatatttgcatatacgatacaaggctgttagagagataattagaattaatttgactgtaaacacaaagatattagtacaaaatacgtgacgtagaaagtaataatttcttgggtagtttgcagttttaaaattatgttttaaaatggactatcatatgcttaccgtaacttgaaagtatttcgatttcttggctttatatatcttgtggaaaggacgaaactaggccgactacaagcgaattatctagagtaattcgcttgtagtcggcttttttcgagtagctagagaattcatggtaatagcgatgactaatacgtagatgtactgccaagtaggaaagtcccataaggtcatgtactgggcataatgccaggcgggccatttaccgtcattgacgtcaatagggggcgtacttggcatatgatacacttgatgtactgccaagtgggcagtttaccgtaaatagtccacccattgacgtcaatggaaagtccctattggcgttactatgggaacatacgtcattattgacgtcaatgggcgggggtcgttgggcggtcagccaggcgggccatttaccgtaagttatgtaacgcggaactccatatatgggctatgaactaatgaccccgtaattgattactattaataactagacccagctttcttgtacaaagttggcattataagaaagcattgcttatcaatttgttgcaacgaacaggtcactatcagtcaaaataaaatcattatttgccatccagctgatatcccctatagtgagtcgtattacatggtcatagctgtttcctggcagctctggcccgtgtctcaaaatctctgatgttacattgcacaagataaaaatatatcatcatgaacaataaaactgtctgcttacataaacagtaatacaaggggtgttatgagccatattcaacgggaaacgtcgaggccgcgattaaattccaacatggatgctgatttatatgggtataaatgggctcgcgataatgtcgggcaatcaggtgcgacaatctatcgcttgtatgggaagcccgatgcgccagagttgtttctgaaacatggcaaaggtagcgttgccaatgatgttacagatgagatggtcagactaaactggctgacggaatttatgcctcttccgaccatcaagcattttatccgtactcctgatgatgcatggttactcaccactgcgatccccggaaaaacagcattccaggtattagaagaatatcctgattcaggtgaaaatattgttgatgcgctggcagtgttcctgcgccggttgcattcgattcctgtttgtaattgtccttttaacagcgatcgcgtatttcgtctcgctcaggcgcaatcacgaatgaataacggtttggttgatgcgagtgattttgatgacgagcgtaatggctggcctgttgaacaagtctggaaagaaatgcataaacttttgccattctcaccggattcagtcgtcactcatggtgatttctcacttgataaccttatttttgacgaggggaaattaataggttgtattgatgttggacgagtcggaatcgcagaccgataccaggatcttgccatcctatggaactgcctcggtgagttttctccttcattacagaaacggctttttcaaaaatatggtattgataatcctgatatgaataaattgcagtttcatttgatgctcgatgagtttttctaatcagaattggttaattggttgtaacactggcagagcattacgctgacttgacgggacggcgcaagctcatgaccaaaatcccttaacgtgagttacgcgtcgttccactgagcgtcagaccccgtagaaaagatcaaaggatcttcttgagatcctttttttctgcgcgtaatctgctgcttgcaaacaaaaaaaccaccgctaccagcggtggtttgtttgccggatcaagagctaccaactctttttccgaaggtaactggcttcagcagagcgcagataccaaatactgtccttctagtgtagccgtagttaggccaccacttcaagaactctgtagcaccgcctacatacctcgctctgctaatcctgttaccagtggctgctgccagtggcgataagtcgtgtcttaccgggttggactcaagacgatagttaccggataaggcgcagcggtcgggctgaacggggggttcgtgcacacagcccagcttggagcgaacgacctacaccgaactgagatacctacagcgtgagcattgagaaagcgccacgcttcccgaagggagaaaggcggacaggtatccggtaagcggcagggtcggaacaggagagcgcacgagggagcttccagggggaaacgcctggtatctttatagtcctgtcgggtttcgccacctctgacttgagcgtcgatttttgtgatgctcgtcaggggggcggagcctatggaaaaacgccagcaacgcggcctttttacggttcctggccttttgctggccttttgct

SEQ ID NO: 213 - DNA, 3890 bp, Artificial Sequence
  ARI-137
ctttcctgcgttatcccctgattctgtggataaccgtattaccgcctttgagtgagctgataccgctcgccgcagccgaacgaccgagcgcagcgagtcagtgagcgaggaagcggaagagcgcccaatacgcaaaccgcctctccccgcgcgttggccgattcattaatgcagctggcacgacaggtttcccgactggaaagcgggcagtgagcgcaacgcaattaatacgcgtaccgctagccaggaagagtttgtagaaacgcaaaaaggccatccgtcaggatggccttctgcttagtttgatgcctggcagtttatggcgggcgtcctgcccgccaccctccgggccgttgcttcacaacgttcaaatccgctcccggcggatttgtcctactcaggagagcgttcaccgacaaacaacagataaaacgaaaggcccagtcttccgactgagcctttcgttttatttgatgcctggcagttccctactctcgcgttaacgctagcatggatgttttcccagtcacgacgttgtaaaacgacggccagtcttaagctcgggccccaaataatgattttattttgactgatagtgacctgttcgttgcaacaaattgatgagcaatgcttttttataatgccaactttgtacaaaaaagcaggctttaaaggaaccaattcagtcgagaattggtaccatatttgcatgtcgctatgtgttctgggaaatcaccataaacgtgaaatgtctttggatttgggaatcttataagttctgtatgagaccactccctaggatgtgaccttctacaagattctagagatcttgtagaaggtcacatcttttttcgacagatctggcgcgccatagtggccagcggccgcaggtaagccagcccaggcctcgccctccagctcaaggcgggacaggtgccctagagtagcctgcatccagggacaggccccagccgggtgctgacacgtccacctccatctcttcctcaggtctgcccgggtggcatccctgtgacccctccccagtgcctctcctggccctggaagttgccactccagtgcccaccagccttgtcctaataaaattaagttgcatcattttgtctgactaggtgtccttctataatattatggggtggaggggggtggtatggagcaaggggcccaagttaacttgtttattgcagcttataatggttacaaataaagcaatagcatcacaaatttcacaaataaagcatttttttcactgcattctagttgtggtttgtccaaactcatcaatgtatcttatcatgtctggatccaaggtcgggcaggaagagggcctatttcccatgattccttcatatttgcatatacgatacaaggctgttagagagataattagaattaatttgactgtaaacacaaagatattagtacaaaatacgtgacgtagaaagtaataatttcttgggtagtttgcagttttaaaattatgttttaaaatggactatcatatgcttaccgtaacttgaaagtatttcgatttcttggctttatatatcttgtggaaaggacgaaactaggccgactacaagcgaattatctagagtaattcgcttgtagtcggcttttttcgagtagctagagaattcatggtaatagcgatgactaatacgtagatgtactgccaagtaggaaagtcccataaggtcatgtactgggcataatgccaggcgggccatttaccgtcattgacgtcaatagggggcgtacttggcatatgatacacttgatgtactgccaagtgggcagtttaccgtaaatagtccacccattgacgtcaatggaaagtccctattggcgttactatgggaacatacgtcattattgacgtcaatgggcgggggtcgttgggcggtcagccaggcgggccatttaccgtaagttatgtaacgcggaactccatatatgggctatgaactaatgaccccgtaattgattactattaataactagacccagctttcttgtacaaagttggcattataagaaagcattgcttatcaatttgttgcaacgaacaggtcactatcagtcaaaataaaatcattatttgccatccagctgatatcccctatagtgagtcgtattacatggtcatagctgtttcctggcagctctggcccgtgtctcaaaatctctgatgttacattgcacaagataaaaatatatcatcatgaacaataaaactgtctgcttacataaacagtaatacaaggggtgttatgagccatattcaacgggaaacgtcgaggccgcgattaaattccaacatggatgctgatttatatgggtataaatgggctcgcgataatgtcgggcaatcaggtgcgacaatctatcgcttgtatgggaagcccgatgcgccagagttgtttctgaaacatggcaaaggtagcgttgccaatgatgttacagatgagatggtcagactaaactggctgacggaatttatgcctcttccgaccatcaagcattttatccgtactcctgatgatgcatggttactcaccactgcgatccccggaaaaacagcattccaggtattagaagaatatcctgattcaggtgaaaatattgttgatgcgctggcagtgttcctgcgccggttgcattcgattcctgtttgtaattgtccttttaacagcgatcgcgtatttcgtctcgctcaggcgcaatcacgaatgaataacggtttggttgatgcgagtgattttgatgacgagcgtaatggctggcctgttgaacaagtctggaaagaaatgcataaacttttgccattctcaccggattcagtcgtcactcatggtgatttctcacttgataaccttatttttgacgaggggaaattaataggttgtattgatgttggacgagtcggaatcgcagaccgataccaggatcttgccatcctatggaactgcctcggtgagttttctccttcattacagaaacggctttttcaaaaatatggtattgataatcctgatatgaataaattgcagtttcatttgatgctcgatgagtttttctaatcagaattggttaattggttgtaacactggcagagcattacgctgacttgacgggacggcgcaagctcatgaccaaaatcccttaacgtgagttacgcgtcgttccactgagcgtcagaccccgtagaaaagatcaaaggatcttcttgagatcctttttttctgcgcgtaatctgctgcttgcaaacaaaaaaaccaccgctaccagcggtggtttgtttgccggatcaagagctaccaactctttttccgaaggtaactggcttcagcagagcgcagataccaaatactgtccttctagtgtagccgtagttaggccaccacttcaagaactctgtagcaccgcctacatacctcgctctgctaatcctgttaccagtggctgctgccagtggcgataagtcgtgtcttaccgggttggactcaagacgatagttaccggataaggcgcagcggtcgggctgaacggggggttcgtgcacacagcccagcttggagcgaacgacctacaccgaactgagatacctacagcgtgagcattgagaaagcgccacgcttcccgaagggagaaaggcggacaggtatccggtaagcggcagggtcggaacaggagagcgcacgagggagcttccagggggaaacgcctggtatctttatagtcctgtcgggtttcgccacctctgacttgagcgtcgatttttgtgatgctcgtcaggggggcggagcctatggaaaaacgccagcaacgcggcctttttacggttcctggccttttgctggccttttgct

SEQ ID NO: 214 - DNA, 3379 bp, Artificial Sequence
  misc_feature (1018)...(1038): n may be any nucleotide
  misc_feature (1060)...(1080): n may be any nucleotide
  source (1)...(3379): ARI-205
ctttcctgcgttatcccctgattctgtggataaccgtattaccgcctttgagtgagctgataccgctcgccgcagccgaacgaccgagcgcagcgagtcagtgagcgaggaagcggaagagcgcccaatacgcaaaccgcctctccccgcgcgttggccgattcattaatgcagctggcacgacaggtttcccgactggaaagcgggcagtgagcgcaacgcaattaatacgcgtaccgctagccaggaagagtttgtagaaacgcaaaaaggccatccgtcaggatggccttctgcttagtttgatgcctggcagtttatggcgggcgtcctgcccgccaccctccgggccgttgcttcacaacgttcaaatccgctcccggcggatttgtcctactcaggagagcgttcaccgacaaacaacagataaaacgaaaggcccagtcttccgactgagcctttcgttttatttgatgcctggcagttccctactctcgcgttaacgctagcatggatgttttcccagtcacgacgttgtaaaacgacggccagtcttaagctcgggccccaaataatgattttattttgactgatagtgacctgttcgttgcaacaaattgatgagcaatgcttttttataatgccaactttgtacaaaaaagcaggctttaaaggaaccaattcagtcgactggatccaaggtcgggcaggaagagggcctatttcccatgattccttcatatttgcatatacgatacaaggctgttagagagataattagaattaatttgactgtaaacacaaagatattagtacaaaatacgtgacgtagaaagtaataatttcttgggtagtttgcagttttaaaattatgttttaaaatggactatcatatgcttaccgtaacttgaaagtatttcgatttcttggctttatatatcttgtggaaaggacgaaactagtccggatcaacgccctaggtttatgtttggatgaactgacatacgcgtatccgtcnnnnnnnnnnnnnnnnnnnnngtagtgaaatatatattaaacnnnnnnnnnnnnnnnnnnnnntacggtaacgcggaattcgcaactattttatcaattttttgcgtcgactcgagtagctagagaattcatggtaatagcgatgactaatacgtagatgtactgccaagtaggaaagtcccataaggtcatgtactgggcataatgccaggcgggccatttaccgtcattgacgtcaatagggggcgtacttggcatatgatacacttgatgtactgccaagtgggcagtttaccgtaaatagtccacccattgacgtcaatggaaagtccctattggcgttactatgggaacatacgtcattattgacgtcaatgggcgggggtcgttgggcggtcagccaggcgggccatttaccgtaagttatgtaacgcggaactccatatatgggctatgaactaatgaccccgtaattgattactattaataactagacccagctttcttgtacaaagttggcattataagaaagcattgcttatcaatttgttgcaacgaacaggtcactatcagtcaaaataaaatcattatttgccatccagctgatatcccctatagtgagtcgtattacatggtcatagctgtttcctggcagctctggcccgtgtctcaaaatctctgatgttacattgcacaagataaaaatatatcatcatgaacaataaaactgtctgcttacataaacagtaatacaaggggtgttatgagccatattcaacgggaaacgtcgaggccgcgattaaattccaacatggatgctgatttatatgggtataaatgggctcgcgataatgtcgggcaatcaggtgcgacaatctatcgcttgtatgggaagcccgatgcgccagagttgtttctgaaacatggcaaaggtagcgttgccaatgatgttacagatgagatggtcagactaaactggctgacggaatttatgcctcttccgaccatcaagcattttatccgtactcctgatgatgcatggttactcaccactgcgatccccggaaaaacagcattccaggtattagaagaatatcctgattcaggtgaaaatattgttgatgcgctggcagtgttcctgcgccggttgcattcgattcctgtttgtaattgtccttttaacagcgatcgcgtatttcgtctcgctcaggcgcaatcacgaatgaataacggtttggttgatgcgagtgattttgatgacgagcgtaatggctggcctgttgaacaagtctggaaagaaatgcataaacttttgccattctcaccggattcagtcgtcactcatggtgatttctcacttgataaccttatttttgacgaggggaaattaataggttgtattgatgttggacgagtcggaatcgcagaccgataccaggatcttgccatcctatggaactgcctcggtgagttttctccttcattacagaaacggctttttcaaaaatatggtattgataatcctgatatgaataaattgcagtttcatttgatgctcgatgagtttttctaatcagaattggttaattggttgtaacactggcagagcattacgctgacttgacgggacggcgcaagctcatgaccaaaatcccttaacgtgagttacgcgtcgttccactgagcgtcagaccccgtagaaaagatcaaaggatcttcttgagatcctttttttctgcgcgtaatctgctgcttgcaaacaaaaaaaccaccgctaccagcggtggtttgtttgccggatcaagagctaccaactctttttccgaaggtaactggcttcagcagagcgcagataccaaatactgtccttctagtgtagccgtagttaggccaccacttcaagaactctgtagcaccgcctacatacctcgctctgctaatcctgttaccagtggctgctgccagtggcgataagtcgtgtcttaccgggttggactcaagacgatagttaccggataaggcgcagcggtcgggctgaacggggggttcgtgcacacagcccagcttggagcgaacgacctacaccgaactgagatacctacagcgtgagcattgagaaagcgccacgcttcccgaagggagaaaggcggacaggtatccggtaagcggcagggtcggaacaggagagcgcacgagggagcttccagggggaaacgcctggtatctttatagtcctgtcgggtttcgccacctctgacttgagcgtcgatttttgtgatgctcgtcaggggggcggagcctatggaaaaacgccagcaacgcggcctttttacggttcctggccttttgctggccttttgct

SEQ ID NO: 215 - DNA, 4744 bp, Artificial Sequence
  misc_feature (3377)...(3398): n may be any nucleotide
  misc_feature (3418)...(3439): n may be any nucleotide
  source (1)...(4744): ARI-206
aacatgtgagcaaaaggccagcaaaaggccaggaaccgtaaaaaggccgcgttgctggcgtttttccataggctccgcccccctgacgagcatcacaaaaatcgacgctcaagtcagaggtggcgaaacccgacaggactataaagataccaggcgtttccccctggaagctccctcgtgcgctctcctgttccgaccctgccgcttaccggatacctgtccgcctttctcccttcgggaagcgtggcgctttctcaatgctcacgctgtaggtatctcagttcggtgtaggtcgttcgctccaagctgggctgtgtgcacgaaccccccgttcagcccgaccgctgcgccttatccggtaactatcgtcttgagtccaacccggtaagacacgacttatcgccactggcagcagccactggtaacaggattagcagagcgaggtatgtaggcggtgctacagagttcttgaagtggtggcctaactacggctacactagaaggacagtatttggtatctgcgctctgctgaagccagttaccttcggaaaaagagttggtagctcttgatccggcaaacaaaccaccgctggtagcggtggtttttttgtttgcaagcagcagattacgcgcagaaaaaaaggatctcaagaagatcctttgatcttttctacggggtctgacgctcagtggaacgacgcgtaactcacgttaagggattttggtcatgagcttgcgccgtcccgtcaagtcagcgtaatgctctgccagtgttacaaccaattaaccaattctgattagaaaaactcatcgagcatcaaatgaaactgcaatttattcatatcaggattatcaataccatatttttgaaaaagccgtttctgtaatgaaggagaaaactcaccgaggcagttccataggatggcaagatcctggtatcggtctgcgattccgactcgtccaacatcaatacaacctattaatttcccctcgtcaaaaataaggttatcaagtgagaaatcaccatgagtgacgactgaatccggtgagaatggcaaaagtttatgcatttctttccagacttgttcaacaggccagccattacgctcgtcatcaaaatcactcgcatcaaccaaaccgttattcattcgtgattgcgcctgagcgagacgaaatacgcgatcgctgttaaaaggacaattacaaacaggaatcgaatgcaaccggcgcaggaacactgccagcgcatcaacaatattttcacctgaatcaggatattcttctaatacctggaatgctgtttttccggggatcgcagtggtgagtaaccatgcatcatcaggagtacggataaaatgcttgatggtcggaagaggcataaattccgtcagccagtttagtctgaccatctcatctgtaacatcattggcaacgctacctttgccatgtttcagaaacaactctggcgcatcgggcttcccatacaagcgatagattgtcgcacctgattgcccgacattatcgcgagcccatttatacccatataaatcagcatccatgttggaatttaatcgcggcctcgacgtttcccgttgaatatggctcataacaccccttgtattactgtttatgtaagcagacagttttattgttcatgatgatatatttttatcttgtgcaatgtaacatcagagattttgagacacgggccagagctgccaggaaacagctatgaccatgtaatacgactcactataggggatatcagctggatggcaaataatgattttattttgactgatagtgacctgttcgttgcaacaaattgataagcaatgctttcttataatgccaactttgtacaagaaagctgggtctagttattaatagtaatcaattacggggtcattagttcatagcccatatatggagttccgcgttacataacttacggtaaatggcccgcctggctgaccgcccaacgacccccgcccattgacgtcaataatgacgtatgttcccatagtaacgccaatagggactttccattgacgtcaatgggtggactatttacggtaaactgcccacttggcagtacatcaagtgtatcatatgccaagtacgccccctattgacgtcaatgacggtaaatggcccgcctggcattatgcccagtacatgaccttatgggactttcctacttggcagtacatctacgtattagtcatcgctattaccatggtgatgcggttttggcagtacatcaatgggcgtggatagcggtttgactcacggggatttccaagtctccaccccattgacgtcaatgggagtttgttttggcaccaaaatcaacgggactttccaaaatgtcgtaacaactccgccccattgacgcaaatgggcggtaggcgtgtacggtgggaggtctatataagcagagctctctggctaactagagaacccactgcttactggcttatcgaaattaatacgactcactatagggagacccaagcttagatctgtttccggtcgccaccatgagcgagctgatcaaggagaacatgcacatgaagctgtacatggagggcaccgtgaacaaccaccacttcaagtgcacatccgagggcgaaggcaagccctacgagggcacccagaccatgaagatcaaggtggtcgagggcggccctctccccttcgccttcgacatcctggctaccagcttcatgtacggcagcaaagccttcatcaaccacacccagggcatccccgacttctttaagcagtccttccctgagggcttcacatgggagagaatcaccacatacgaagacgggggcgtgctgaccgctacccaggacaccagcttccagaacggctgcatcatctacaacgtcaagatcaacggggtgaacttcccatccaacggccctgtgatgcagaagaaaacacgcggctgggaggccaacaccgagatgctgtaccccgctgacggcggcctgagaggccacagccagatggccctgaagctcgtgggcgggggctacctgcactgctccttcaagaccacatacagatccaagaaacccgctaagaacctcaagatgcccggcttccacttcgtggaccacagactggaaagaatcaaggaggccgacaaagagacctacgtcgagcagcacgagatggctgtggccaagtactgcgacctccctagcaaactggggcacagataatcgatagtttgtttgaatgaggcttcagtactttacagaatcgttgcctgcacatcttggaaacacttgctgggattacttcttcaggttaacccaacagaaggctcgagaaggtatattgctgttgacagtgagcgnnnnnnnnnnnnnnnnnnnnnntagtgaagccacagatgtannnnnnnnnnnnnnnnnnnnnntgcctactgcctcggaattcaaggggctactttaggagcaattatcttgtttactaaaactgaataccttgctatctctttgatacatttttacaaagctgaattaaaatggtataaattaaatcacttttttcaattctctagaggtaccgcatgcgtacgtggccagcggccgcaggtaagccagcccaggcctcgccctccagctcaaggcgggacaggtgccctagagtagcctgcatccagggacaggccccagccgggtgctgacacgtccacctccatctcttcctcaggtctgcccgggtggcatccctgtgacccctccccagtgcctctcctggccctggaagttgccactccagtgcccaccagccttgtcctaataaaattaagttgcatcattttgtctgactaggtgtccttctataatattatggggtggaggggggtggtatggagcaaggggcccaagttaacttgtttattgcagcttataatggttacaaataaagcaatagcatcacaaatttcacaaataaagcatttttttcactgcattctagttgtggtttgtccaaactcatcaatgtatcttatcatgtctggatccagtcgactgaattggttcctttaaagcctgcttttttgtacaaagttggcattataaaaaagcattgctcatcaatttgttgcaacgaacaggtcactatcagtcaaaataaaatcattatttggggcccgagcttaagactggccgtcgttttacaacgtcgtgactgggaaaacatccatgctagcgttaacgcgagagtagggaactgccaggcatcaaataaaacgaaaggctcagtcggaagactgggcctttcgttttatctgttgtttgtcggtgaacgctctcctgagtaggacaaatccgccgggagcggatttgaacgttgtgaagcaacggcccggagggtggcgggcaggacgcccgccataaactgccaggcatcaaactaagcagaaggccatcctgacggatggcctttttgcgtttctacaaactcttcctggctagcggtacgcgtattaattgcgttgcgctcactgcccgctttccagtcgggaaacctgtcgtgccagctgcattaatgaatcggccaacgcgcggggagaggcggtttgcgtattgggcgctcttccgcttcctcgctcactgactcgctgcgctcggtcgttcggctgcggcgagcggtatcagctcactcaaaggcggtaatacggttatccacagaatcaggggataacgcaggaaag

SEQ ID NO: 216 - DNA, 3377 bp, Artificial Sequence
  misc_feature (1018)...(1036): n may be any nucleotide
  misc_feature (1058)...(1078): n may be any nucleotide
  source (1)...(3377): ARI-207
ctttcctgcgttatcccctgattctgtggataaccgtattaccgcctttgagtgagctgataccgctcgccgcagccgaacgaccgagcgcagcgagtcagtgagcgaggaagcggaagagcgcccaatacgcaaaccgcctctccccgcgcgttggccgattcattaatgcagctggcacgacaggtttcccgactggaaagcgggcagtgagcgcaacgcaattaatacgcgtaccgctagccaggaagagtttgtagaaacgcaaaaaggccatccgtcaggatggccttctgcttagtttgatgcctggcagtttatggcgggcgtcctgcccgccaccctccgggccgttgcttcacaacgttcaaatccgctcccggcggatttgtcctactcaggagagcgttcaccgacaaacaacagataaaacgaaaggcccagtcttccgactgagcctttcgttttatttgatgcctggcagttccctactctcgcgttaacgctagcatggatgttttcccagtcacgacgttgtaaaacgacggccagtcttaagctcgggccccaaataatgattttattttgactgatagtgacctgttcgttgcaacaaattgatgagcaatgcttttttataatgccaactttgtacaaaaaagcaggctttaaaggaaccaattcagtcgactggatccaaggtcgggcaggaagagggcctatttcccatgattccttcatatttgcatatacgatacaaggctgttagagagataattagaattaatttgactgtaaacacaaagatattagtacaaaatacgtgacgtagaaagtaataatttcttgggtagtttgcagttttaaaattatgttttaaaatggactatcatatgcttaccgtaacttgaaagtatttcgatttcttggctttatatatcttgtggaaaggacgaaactagtccggatcaacgccctaggtttatgtttggatgaactgacatacgcgtatccgtcnnnnnnnnnnnnnnnnnnngtagtgaaatatatattaaacnnnnnnnnnnnnnnnnnnnnntacggtaacgcggaattcgcaactattttatcaattttttgcgtcgactcgagtagctagagaattcatggtaatagcgatgactaatacgtagatgtactgccaagtaggaaagtcccataaggtcatgtactgggcataatgccaggcgggccatttaccgtcattgacgtcaatagggggcgtacttggcatatgatacacttgatgtactgccaagtgggcagtttaccgtaaatagtccacccattgacgtcaatggaaagtccctattggcgttactatgggaacatacgtcattattgacgtcaatgggcgggggtcgttgggcggtcagccaggcgggccatttaccgtaagttatgtaacgcggaactccatatatgggctatgaactaatgaccccgtaattgattactattaataactagacccagctttcttgtacaaagttggcattataagaaagcattgcttatcaatttgttgcaacgaacaggtcactatcagtcaaaataaaatcattatttgccatccagctgatatcccctatagtgagtcgtattacatggtcatagctgtttcctggcagctctggcccgtgtctcaaaatctctgatgttacattgcacaagataaaaatatatcatcatgaacaataaaactgtctgcttacataaacagtaatacaaggggtgttatgagccatattcaacgggaaacgtcgaggccgcgattaaattccaacatggatgctgatttatatgggtataaatgggctcgcgataatgtcgggcaatcaggtgcgacaatctatcgcttgtatgggaagcccgatgcgccagagttgtttctgaaacatggcaaaggtagcgttgccaatgatgttacagatgagatggtcagactaaactggctgacggaatttatgcctcttccgaccatcaagcattttatccgtactcctgatgatgcatggttactcaccactgcgatccccggaaaaacagcattccaggtattagaagaatatcctgattcaggtgaaaatattgttgatgcgctggcagtgttcctgcgccggttgcattcgattcctgtttgtaattgtccttttaacagcgatcgcgtatttcgtctcgctcaggcgcaatcacgaatgaataacggtttggttgatgcgagtgattttgatgacgagcgtaatggctggcctgttgaacaagtctggaaagaaatgcataaacttttgccattctcaccggattcagtcgtcactcatggtgatttctcacttgataaccttatttttgacgaggggaaattaataggttgtattgatgttggacgagtcggaatcgcagaccgataccaggatcttgccatcctatggaactgcctcggtgagttttctccttcattacagaaacggctttttcaaaaatatggtattgataatcctgatatgaataaattgcagtttcatttgatgctcgatgagtttttctaatcagaattggttaattggttgtaacactggcagagcattacgctgacttgacgggacggcgcaagctcatgaccaaaatcccttaacgtgagttacgcgtcgttccactgagcgtcagaccccgtagaaaagatcaaaggatcttcttgagatcctttttttctgcgcgtaatctgctgcttgcaaacaaaaaaaccaccgctaccagcggtggtttgtttgccggatcaagagctaccaactctttttccgaaggtaactggcttcagcagagcgcagataccaaatactgtccttctagtgtagccgtagttaggccaccacttcaagaactctgtagcaccgcctacatacctcgctctgctaatcctgttaccagtggctgctgccagtggcgataagtcgtgtcttaccgggttggactcaagacgatagttaccggataaggcgcagcggtcgggctgaacggggggttcgtgcacacagcccagcttggagcgaacgacctacaccgaactgagatacctacagcgtgagcattgagaaagcgccacgcttcccgaagggagaaaggcggacaggtatccggtaagcggcagggtcggaacaggagagcgcacgagggagcttccagggggaaacgcctggtatctttatagtcctgtcgggtttcgccacctctgacttgagcgtcgatttttgtgatgctcgtcaggggggcggagcctatggaaaaacgccagcaacgcggcctttttacggttcctggccttttgctggccttttgct

SEQ ID NO: 217 - DNA, 4738 bp, Artificial Sequence
  misc_feature (3377)...(3395): n may be any nucleotide
  misc_feature (3415)...(3433): n may be any nucleotide
  source (1)...(4738): ARI-208
aacatgtgagcaaaaggccagcaaaaggccaggaaccgtaaaaaggccgcgttgctggcgtttttccataggctccgcccccctgacgagcatcacaaaaatcgacgctcaagtcagaggtggcgaaacccgacaggactataaagataccaggcgtttccccctggaagctccctcgtgcgctctcctgttccgaccctgccgcttaccggatacctgtccgcctttctcccttcgggaagcgtggcgctttctcaatgctcacgctgtaggtatctcagttcggtgtaggtcgttcgctccaagctgggctgtgtgcacgaaccccccgttcagcccgaccgctgcgccttatccggtaactatcgtcttgagtccaacccggtaagacacgacttatcgccactggcagcagccactggtaacaggattagcagagcgaggtatgtaggcggtgctacagagttcttgaagtggtggcctaactacggctacactagaaggacagtatttggtatctgcgctctgctgaagccagttaccttcggaaaaagagttggtagctcttgatccggcaaacaaaccaccgctggtagcggtggtttttttgtttgcaagcagcagattacgcgcagaaaaaaaggatctcaagaagatcctttgatcttttctacggggtctgacgctcagtggaacgacgcgtaactcacgttaagggattttggtcatgagcttgcgccgtcccgtcaagtcagcgtaatgctctgccagtgttacaaccaattaaccaattctgattagaaaaactcatcgagcatcaaatgaaactgcaatttattcatatcaggattatcaataccatatttttgaaaaagccgtttctgtaatgaaggagaaaactcaccgaggcagttccataggatggcaagatcctggtatcggtctgcgattccgactcgtccaacatcaatacaacctattaatttcccctcgtcaaaaataaggttatcaagtgagaaatcaccatgagtgacgactgaatccggtgagaatggcaaaagtttatgcatttctttccagacttgttcaacaggccagccattacgctcgtcatcaaaatcactcgcatcaaccaaaccgttattcattcgtgattgcgcctgagcgagacgaaatacgcgatcgctgttaaaaggacaattacaaacaggaatcgaatgcaaccggcgcaggaacactgccagcgcatcaacaatattttcacctgaatcaggatattcttctaatacctggaatgctgtttttccggggatcgcagtggtgagtaaccatgcatcatcaggagtacggataaaatgcttgatggtcggaagaggcataaattccgtcagccagtttagtctgaccatctcatctgtaacatcattggcaacgctacctttgccatgtttcagaaacaactctggcgcatcgggcttcccatacaagcgatagattgtcgcacctgattgcccgacattatcgcgagcccatttatacccatataaatcagcatccatgttggaatttaatcgcggcctcgacgtttcccgttgaatatggctcataacaccccttgtattactgtttatgtaagcagacagttttattgttcatgatgatatatttttatcttgtgcaatgtaacatcagagattttgagacacgggccagagctgccaggaaacagctatgaccatgtaatacgactcactataggggatatcagctggatggcaaataatgattttattttgactgatagtgacctgttcgttgcaacaaattgataagcaatgctttcttataatgccaactttgtacaagaaagctgggtctagttattaatagtaatcaattacggggtcattagttcatagcccatatatggagttccgcgttacataacttacggtaaatggcccgcctggctgaccgcccaacgacccccgcccattgacgtcaataatgacgtatgttcccatagtaacgccaatagggactttccattgacgtcaatgggtggactatttacggtaaactgcccacttggcagtacatcaagtgtatcatatgccaagtacgccccctattgacgtcaatgacggtaaatggcccgcctggcattatgcccagtacatgaccttatgggactttcctacttggcagtacatctacgtattagtcatcgctattaccatggtgatgcggttttggcagtacatcaatgggcgtggatagcggtttgactcacggggatttccaagtctccaccccattgacgtcaatgggagtttgttttggcaccaaaatcaacgggactttccaaaatgtcgtaacaactccgccccattgacgcaaatgggcggtaggcgtgtacggtgggaggtctatataagcagagctctctggctaactagagaacccactgcttactggcttatcgaaattaatacgactcactatagggagacccaagcttagatctgtttccggtcgccaccatgagcgagctgatcaaggagaacatgcacatgaagctgtacatggagggcaccgtgaacaaccaccacttcaagtgcacatccgagggcgaaggcaagccctacgagggcacccagaccatgaagatcaaggtggtcgagggcggccctctccccttcgccttcgacatcctggctaccagcttcatgtacggcagcaaagccttcatcaaccacacccagggcatccccgacttctttaagcagtccttccctgagggcttcacatgggagagaatcaccacatacgaagacgggggcgtgctgaccgctacccaggacaccagcttccagaacggctgcatcatctacaacgtcaagatcaacggggtgaacttcccatccaacggccctgtgatgcagaagaaaacacgcggctgggaggccaacaccgagatgctgtaccccgctgacggcggcctgagaggccacagccagatggccctgaagctcgtgggcgggggctacctgcactgctccttcaagaccacatacagatccaagaaacccgctaagaacctcaagatgcccggcttccacttcgtggaccacagactggaaagaatcaaggaggccgacaaagagacctacgtcgagcagcacgagatggctgtggccaagtactgcgacctccctagcaaactggggcacagataatcgatagtttgtttgaatgaggcttcagtactttacagaatcgttgcctgcacatcttggaaacacttgctgggattacttcttcaggttaacccaacagaaggctcgagaaggtatattgctgttgacagtgagcgnnnnnnnnnnnnnnnnnnntagtgaagccacagatgtannnnnnnnnnnnnnnnnnntgcctactgcctcggaattcaaggggctactttaggagcaattatcttgtttactaaaactgaataccttgctatctctttgatacatttttacaaagctgaattaaaatggtataaattaaatcacttttttcaattctctagaggtaccgcatgcgtacgtggccagcggccgcaggtaagccagcccaggcctcgccctccagctcaaggcgggacaggtgccctagagtagcctgcatccagggacaggccccagccgggtgctgacacgtccacctccatctcttcctcaggtctgcccgggtggcatccctgtgacccctccccagtgcctctcctggccctggaagttgccactccagtgcccaccagccttgtcctaataaaattaagttgcatcattttgtctgactaggtgtccttctataatattatggggtggaggggggtggtatggagcaaggggcccaagttaacttgtttattgcagcttataatggttacaaataaagcaatagcatcacaaatttcacaaataaagcatttttttcactgcattctagttgtggtttgtccaaactcatcaatgtatcttatcatgtctggatccagtcgactgaattggttcctttaaagcctgcttttttgtacaaagttggcattataaaaaagcattgctcatcaatttgttgcaacgaacaggtcactatcagtcaaaataaaatcattatttggggcccgagcttaagactggccgtcgttttacaacgtcgtgactgggaaaacatccatgctagcgttaacgcgagagtagggaactgccaggcatcaaataaaacgaaaggctcagtcggaagactgggcctttcgttttatctgttgtttgtcggtgaacgctctcctgagtaggacaaatccgccgggagcggatttgaacgttgtgaagcaacggcccggagggtggcgggcaggacgcccgccataaactgccaggcatcaaactaagcagaaggccatcctgacggatggcctttttgcgtttctacaaactcttcctggctagcggtacgcgtattaattgcgttgcgctcactgcccgctttccagtcgggaaacctgtcgtgccagctgcattaatgaatcggccaacgcgcggggagaggcggtttgcgtattgggcgctcttccgcttcctcgctcactgactcgctgcgctcggtcgttcggctgcggcgagcggtatcagctcactcaaaggcggtaatacggttatccacagaatcaggggataacgcaggaaag

SEQ ID NO: 218 - DNA, 6329 bp, Artificial Sequence
  pKD46
catcgatttattatgacaacttgacggctacatcattcactttttcttcacaaccggcacggaactcgctcgggctggccccggtgcattttttaaatacccgcgagaaatagagttgatcgtcaaaaccaacattgcgaccgacggtggcgataggcatccgggtggtgctcaaaagcagcttcgcctggctgatacgttggtcctcgcgccagcttaagacgctaatccctaactgctggcggaaaagatgtgacagacgcgacggcgacaagcaaacatgctgtgcgacgctggcgatatcaaaattgctgtctgccaggtgatcgctgatgtactgacaagcctcgcgtacccgattatccatcggtggatggagcgactcgttaatcgcttccatgcgccgcagtaacaattgctcaagcagatttatcgccagcagctccgaatagcgcccttccccttgcccggcgttaatgatttgcccaaacaggtcgctgaaatgcggctggtgcgcttcatccgggcgaaagaaccccgtattggcaaatattgacggccagttaagccattcatgccagtaggcgcgcggacgaaagtaaacccactggtgataccattcgcgagcctccggatgacgaccgtagtgatgaatctctcctggcgggaacagcaaaatatcacccggtcggcaaacaaattctcgtccctgatttttcaccaccccctgaccgcgaatggtgagattgagaatataacctttcattcccagcggtcggtcgataaaaaaatcgagataaccgttggcctcaatcggcgttaaacccgccaccagatgggcattaaacgagtatcccggcagcaggggatcattttgcgcttcagccatacttttcatactcccgccattcagagaagaaaccaattgtccatattgcatcagacattgccgtcactgcgtcttttactggctcttctcgctaaccaaaccggtaaccccgcttattaaaagcattctgtaacaaagcgggaccaaagccatgacaaaaacgcgtaacaaaagtgtctataatcacggcagaaaagtccacattgattatttgcacggcgtcacactttgctatgccatagcatttttatccataagattagcggatcctacctgacgctttttatcgcaactctctactgtttctccatacccgtttttttgggaattcgagctctaaggaggttataaaaaatggatattaatactgaaactgagatcaagcaaaagcattcactaaccccctttcctgttttcctaatcagcccggcatttcgcgggcgatattttcacagctatttcaggagttcagccatgaacgcttattacattcaggatcgtcttgaggctcagagctgggcgcgtcactaccagcagctcgcccgtgaagagaaagaggcagaactggcagacgacatggaaaaaggcctgccccagcacctgtttgaatcgctatgcatcgatcatttgcaacgccacggggccagcaaaaaatccattacccgtgcgtttgatgacgatgttgagtttcaggagcgcatggcagaacacatccggtacatggttgaaaccattgctcaccaccaggttgatattgattcagaggtataaaacgaatgagtactgcactcgcaacgctggctgggaagctggctgaacgtgtcggcatggattctgtcgacccacaggaactgatcaccactcttcgccagacggcatttaaaggtgatgccagcgatgcgcagttcatcgcattactgatcgttgccaaccagtacggccttaatccgtggacgaaagaaatttacgcctttcctgataagcagaatggcatcgttccggtggtgggcgttgatggctggtcccgcatcatcaatgaaaaccagcagtttgatggcatggactttgagcaggacaatgaatcctgtacatgccggatttaccgcaaggaccgtaatcatccgatctgcgttaccgaatggatggatgaatgccgccgcgaaccattcaaaactcgcgaaggcagagaaatcacggggccgtggcagtcgcatcccaaacggatgttacgtcataaagccatgattcagtgtgcccgtctggccttcggatttgctggtatctatgacaaggatgaagccgagcgcattgtcgaaaatactgcatacactgcagaacgtcagccggaacgcgacatcactccggttaacgatgaaaccatgcaggagattaacactctgctgatcgccctggataaaacatgggatgacgacttattgccgctctgttcccagatatttcgccgcgacattcgtgcatcgtcagaactgacacaggccgaagcagtaaaagctcttggattcctgaaacagaaagccgcagagcagaaggtggcagcatgacaccggacattatcctgcagcgtaccgggatcgatgtgagagctgtcgaacagggggatgatgcgtggcacaaattacggctcggcgtcatcaccgcttcagaagttcacaacgtgatagcaaaaccccgctccggaaagaagtggcctgacatgaaaatgtcctacttccacaccctgcttgctgaggtttgcaccggtgtggctccggaagttaacgctaaagcactggcctggggaaaacagtacgagaacgacgccagaaccctgtttgaattcacttccggcgtgaatgttactgaatccccgatcatctatcgcgacgaaagtatgcgtaccgcctgctctcccgatggtttatgcagtgacggcaacggccttgaactgaaatgcccgtttacctcccgggatttcatgaagttccggctcggtggtttcgaggccataaagtcagcttacatggcccaggtgcagtacagcatgtgggtgacgcgaaaaaatgcctggtactttgccaactatgacccgcgtatgaagcgtgaaggcctgcattatgtcgtgattgagcgggatgaaaagtacatggcgagttttgacgagatcgtgccggagttcatcgaaaaaatggacgaggcactggctgaaattggttttgtatttggggagcaatggcgatgacgcatcctcacgataatatccgggtaggcgcaatcactttcgtctactccgttacaaagcgaggctgggtatttcccggcctttctgttatccgaaatccactgaaagcacagcggctggctgaggagataaataataaacgaggggctgtatgcacaaagcatcttctgttgagttaagaacgagtatcgagatggcacatagccttgctcaaattggaatcaggtttgtgccaataccagtagaaacagacgaagaatccatgggtatggacagttttccctttgatatgtaacggtgaacagttgttctacttttgtttgttagtcttgatgcttcactgatagatacaagagccataagaacctcagatccttccgtatttagccagtatgttctctagtgtggttcgttgtttttgcgtgagccatgagaacgaaccattgagatcatacttactttgcatgtcactcaaaaattttgcctcaaaactggtgagctgaatttttgcagttaaagcatcgtgtagtgtttttcttagtccgttacgtaggtaggaatctgatgtaatggttgttggtattttgtcaccattcatttttatctggttgttctcaagttcggttacgagatccatttgtctatctagttcaacttggaaaatcaacgtatcagtcgggcggcctcgcttatcaaccaccaatttcatattgctgtaagtgtttaaatctttacttattggtttcaaaacccattggttaagccttttaaactcatggtagttattttcaagcattaacatgaacttaaattcatcaaggctaatctctatatttgccttgtgagttttcttttgtgttagttcttttaataaccactcataaatcctcatagagtatttgttttcaaaagacttaacatgttccagattatattttatgaatttttttaactggaaaagataaggcaatatctcttcactaaaaactaattctaatttttcgcttgagaacttggcatagtttgtccactggaaaatctcaaagcctttaaccaaaggattcctgatttccacagttctcgtcatcagctctctggttgctttagctaatacaccataagcattttccctactgatgttcatcatctgagcgtattggttataagtgaacgataccgtccgttctttccttgtagggttttcaatcgtggggttgagtagtgccacacagcataaaattagcttggtttcatgctccgttaagtcatagcgactaatcgctagttcatttgctttgaaaacaactaattcagacatacatctcaattggtctaggtgattttaatcactataccaattgagatgggctagtcaatgataattactagtccttttcctttgagttgtgggtatctgtaaattctgctagacctttgctggaaaacttgtaaattctgctagaccctctgtaaattccgctagacctttgtgtgttttttttgtttatattcaagtggttataatttatagaataaagaaagaataaaaaaagataaaaagaatagatcccagccctgtgtataactcactactttagtcagttccgcagtattacaaaaggatgtcgcaaacgctgtttgctcctctacaaaacagaccttaaaaccctaaaggcttaagtagcaccctcgcaagctcggttgcggccgcaatcgggcaaatcgctgaatattccttttgtctccgaccatcaggcacctgagtcgctgtctttttcgtgacattcagttcgctgcgctcacggctctggcagtgaatgggggtaaatggcactacaggcgccttttatggattcatgcaaggaaactacccataatacaagaaaagcccgtcacgggcttctcagggcgttttatggcgggtctgctatgtggtgctatctgactttttgctgttcagcagttcctgccctctgattttccagtctgaccacttcggattatcccgtgacaggtcattcagactggctaatgcacccagtaaggcagcggtatcatcaacggggtctgacgctcagtggaacgaaaactcacgttaagggattttggtcatgagattatcaaaaaggatcttcacctagatccttttaaattaaaaatgaagttttaaatcaatctaaagtatatatgagtaaacttggtctgacagttaccaatgcttaatcagtgaggcacctatctcagcgatctgtctatttcgttcatccatagttgcctgactccccgtcgtgtagataactacgatacgggagggcttaccatctggccccagtgctgcaatgataccgcgagacccacgctcaccggctccagatttatcagcaataaaccagccagccggaagggccgagcgcagaagtggtcctgcaactttatccgcctccatccagtctattaattgttgccgggaagctagagtaagtagttcgccagttaatagtttgcgcaacgttgttgccattgctacaggcatcgtggtgtcacgctcgtcgtttggtatggcttcattcagctccggttcccaacgatcaaggcgagttacatgatcccccatgttgtgcaaaaaagcggttagctccttcggtcctccgatcgttgtcagaagtaagttggccgcagtgttatcactcatggttatggcagcactgcataattctcttactgtcatgccatccgtaagatgcttttctgtgactggtgagtactcaaccaagtcattctgagaatagtgtatgcggcgaccgagttgctcttgcccggcgtcaatacgggataataccgcgccacatagcagaactttaaaagtgctcatcattggaaaacgttcttcggggcgaaaactctcaaggatcttaccgctgttgagatccagttcgatgtaacccactcgtgcacccaactgatcttcagcatcttttactttcaccagcgtttctgggtgagcaaaaacaggaaggcaaaatgccgcaaaaaagggaataagggcgacacggaaatgttgaatactcatactcttcctttttcaatattattgaagcatttatcagggttattgtctcatgagcggatacatatttgaatgtatttagaaaaataaacaaataggggttccgcgcacatttccccgaaaagtgccacctg

SEQ ID NO: 219 - DNA, 22 bp, Artificial Sequence
  asd-1 primer
ccttcctaacgcaaattccctg

SEQ ID NO: 220 - DNA, 22 bp, Artificial Sequence
  asd-2 primer
ccaatgctctgcttaactcctg

SEQ ID NO: 221 - DNA, 21 bp, Artificial Sequence
  asd-3 primer
gcctcgccatgtttcagtacg

SEQ ID NO: 222 - DNA, 21 bp, Artificial Sequence
  asd-4 primer
ggtctggtgcattccgagtac

SEQ ID NO: 223 - DNA, 23 bp, Artificial Sequence
  scFv-3 primer
cataatctgggtccttggtctgc

SEQ ID NO: 224 - DNA, 5728 bp, Artificial Sequence
  pJW168 plasmid
ttactaatcgccatcttccagcaggcgcaccattgcccctgtttcactatccaggttacggatatagttcatgacaatatttacattggtccagccaccagcttgcatgatctccggtattgaaactccagcgcgggccatatctcgcgcggctccgacacgggcactgtgtccagaccaggccaggtatctctgaccagagtcatccttagcgccgtaaatcaatcgatgagttgcttcaaaaatcccttccagggcgcgagttgatagctggctggtggcagatggcgcggcaacaccattttttctgacccggcaaaacaggtagttattcggatcatcagctacaccagagacggaaatccatcgctcgaccagtttagttacccccaggctaagtgccttctctacacctgcggtgctaaccagcgttttcgttctgccaatatggattaacattctcccaccgtcagtacgtgagatatctttaaccctgatcctggcaatttcggctatacgtaacagggtgttataagcaatccccagaaatgccagattacgtatatcctggcagcgatcgctattttccatgagtgaacgaacctggtcgaaatcagtgcgttcgaacgctagagcctgttttgcacgttcaccggcatcaacgttttcttttcggatccgccgcataaccagtgaaacagcattgctgtcacttggtcgtggcagcccggaccgacgatgaagcatgtttagctggcccaaatgttgctggatagtttttactgccagaccgcgcgcctgaagatatagaagataatcgcgaacatcttcaggttctgcgggaaaccatttccggttattcaacttgcaccatgccgcccacgaccggcaaacggacagaagcattttccaggtatgctcagaaaacgcctggcgatccctgaacatgtccatcaggttcttgcgaacctcatcactcgttgcatcgaccggtaatgcaggcaaattttggtgtacgggcagtaaattggacatgtcaacggtacctgcagtctagagtcgaggcctgtttcctgtgtgaaattgttatccgctcacaattccacacattatacgagccggaagcataaagtgtaaagcctggggtgcctaatgagtgagctgtttcctgtgtgaaattgttatccgctcacaattccacacattatacgagccggaagcataaagtgtaaagcctggggtgcctaatgagtgagctgcctcgcgcgtttcggtgatgacggtgaaaacctctgacacatgcagctcccggagacggtcacagcttgtctgtaagcggatgccgggagcagacaagcccgtcagggcgcgtcagcgggtgttggcgggtgtcggggcgcagccatgacccagtcacgtagcgatagacggagtgtatccgacaccatcgaatggtgcaaaacctttcgcggtatggcatgatagcgcccggaagagagtcaattcagggtggtgaatgtgaaaccagtaacgttatacgatgtcgcagagtatgccggtgtctcttatcagaccgtttcccgcgtggtgaaccaggccagccacgtttctgcgaaaacgcgggaaaaagtggaagcggcgatggcggagctgaattacattcccaaccgcgtggcacaacaactggcgggcaaacagtcgttgctgattggcgttgccacctccagtctggccctgcacgcgccgtcgcaaattgtcgcggcgattaaatctcgcgccgatcaactgggtgccagcgtggtggtgtcgatggtagaacgaagcggcgtcgaagcctgtaaagcggcggtgcacaatcttctcgcgcaacgcgtcagtgggctgatcattaactatccgctggatgaccaggatgccattgctgtggaagctgcctgcactaatgttccggcgttatttcttgatgtctctgaccagacacccatcaacagtattattttctcccatgaagacggtacgcgactgggcgtggagcatctggtcgcattgggtcaccagcaaatcgcgctgttagcgggcccattaagttctgtctcggcgcgtctgcgtctggctggctggcataaatatctcactcgcaatcaaattcagccgatagcggaacgggaaggcgactggagtgccatgtccggttttcaacaaaccatgcaaatgctgaatgagggcatcgttcccactgcgatgctggttgccaacgatcagatggcgctgggcgcaatgcgcgccattaccgagtccgggctgcgcgttggtgcggatatctcggtagtgggatacgacgataccgaagacagctcatgttatatcccgccgttaaccaccatcaaacaggattttcgcctgctggggcaaaccagcgtggaccgcttgctgcaactctctcagggccaggcggtgaagggcaatcagctgttgcccgtctcactggtgaaaagaaaaaccaccctggcgcccaatacgcaaaccgcctctccccgcgcgttggccgattcattaatgcagctggcacgacaggtttcccgactggaaagcgggcagtgagcgcaacgcaatcaatgtgagttagctcactcattaggcaccccaggctttacactttatgcttccgaccatactggcttaactatgcggcatcagagcagattgtactgagagtgcaccatcgatgcaggtggcacttttcggggaaatgtgcgcggaacccctatttgtttatttttctaaatacattcaaatatgtatccgctcatgagacaataaccctgataaatgcttcaataatattgaaaaaggaagagtatgagtattcaacatttccgtgtcgcccttattcccttttttgcggcattttgccttcctgtttttgctcacccagaaacgctggtgaaagtaaaagatgctgaagatcagttgggtgcacgagtgggttacatcgaactggatctcaacagcggtaagatccttgagagttttcgccccgaagaacgttttccaatgatgagcacttttaaagttctgctatgtggcgcggtattatcccgtattgacgccgggcaagagcaactcggtcgccgcatacactattctcagaatgacttggttgagtactcaccagtcacagaaaagcatcttacggatggcatgacagtaagagaattatgcagtgctgccataaccatgagtgataacactgcggccaacttacttctgacaacgatcggaggaccgaaggagctaaccgcttttttgcacaacatgggggatcatgtaactcgccttgatcgttgggaaccggagctgaatgaagccataccaaacgacgagcgtgacaccacgatgcctgtagcaatggcaacaacgttgcgcaaactattaactggcgaactacttactctagcttcccggcaacaattaatagactggatggaggcggataaagttgcaggaccacttctgcgctcggcccttccggctggctggtttattgctgataaatctggagccggtgagcgtgggtctcgcggtatcattgcagcactggggccagatggtaagccctcccgtatcgtagttatctacacgacggggagtcaggcaactatggatgaacgaaatagacagatcgctgagataggtgcctcactgattaagcattggtaactgtcagaccaagtttactcatatatactttagattgatttaaaacttcatttttaatttaaaaggatctaggtgaagatcctttttgataatctcatgaccaaaatcccttaacgtgagttttcgttccactgagcgtcagaccccgttgatgataccgctgccttactgggtgcattagccagtctgaatgacctgtcacgggataatccgaagtggtcagactggaaaatcagagggcaggaactgctgaacagcaaaaagtcagatagcaccacatagcagacccgccataaaacgccctgagaagcccgtgacgggcttttcttgtattatgggtagtttccttgcatgaatccataaaaggcgcctgtagtgccatttacccccattcactgccagagccgtgagcgcagcgaactgaatgtcacgaaaaagacagcgactcaggtgcctgatggtcggagacaaaaggaatattcagcgatttgcccgattgcggccgcaaccgagcttgcgagggtgctacttaagcctttagggttttaaggtctgttttgtagaggagcaaacagcgtttgcgacatccttttgtaatactgcggaactgactaaagtagtgagttatacacagggctgggatctattctttttatctttttttattctttctttattctataaattataaccacttgaatataaacaaaaaaaacacacaaaggtctagcggaatttacagagggtctagcagaatttacaagttttccagcaaaggtctagcagaatttacagatacccacaactcaaaggaaaaggactagtaattatcattgactagcccatctcaattggtatagtgattaaaatcacctagaccaattgagatgtatgtctgaattagttgttttcaaagcaaatgaactagcgattagtcgctatgacttaacggagcatgaaaccaagctaattttatgctgtgtggcactactcaaccccacgattgaaaaccctacaaggaaagaacggacggtatcgttcacttataaccaatacgttcagatgatgaacatcagtagggaaaatgcttatggtgtattagctaaagcaaccagagagctgatgacgagaactgtggaaatcaggaatcctttggttaaaggctttgagattttccagtggacaaactatgccaagttctcaagcgaaaaattagaattagtttttagtgaagagatattgccttatcttttccagttaaaaaaattcataaaatataatctggaacatgttaagtcttttgaaaacaaatactctatgaggatttatgagtggttattaaaagaactaacacaaaagaaaactcacaaggcaaatatagagattagccttgatgaatttaagttcatgttaatgcttgaaaataactaccatgagtttaaaaggcttaaccaatgggttttgaaaccaataagtaaagatttaaacacttacagcaatatgaaattggtggttgataagcgaggccgcccgactgatacgttgattttccaagttgaactagatagacaaatggatctcgtaaccgaacttgagaacaaccagataaaaatgaatggtgacaaaataccaacaaccattacatcagattcctacctacataacggactaagaaaaacactacacgatgctttaactgcaaaaattcagctcaccagttttgaggcaaaatttttgagtgacatgcaaagtaagyatgatctcaatggttcgttctcatggctcacgcaaaaacaacgaaccacactagagaacatactggctaaatacggaaggatctgaggttcttatggctcttgtatctatcagtgaagcatcaagactaacaaacaaaagtagaacaactgttcaccgttacatatcaaagggaaaactgtccatacccatgggctagctgatcagccagtgccaagcttgctcaatcaatcaccggatcccccgggaattc

SEQ ID NO: 225 - DNA, 3736 bp, Artificial Sequence
  pATIU6 plasmid
gcgcccaatacgcaaaccgcctctccccgcgcgttggccgattcattaatgcagctggcacgacaggtttcccgactggaaagcgggcagtgagcgcaacgcaatggatccaaggtcgggcaggaagagggcctatttcccatgattccttcatatttgcatatacgatacaaggctgttagagagataattagaattaatttgactgtaaacacaaagatattagtacaaaatacgtgacgtagaaagtaataatttcttgggtagtttgcagttttaaaattatgttttaaaatggactatcatatgcttaccgtaacttgaaagtatttcgatttcttggctttatatatcttgtggaaaggacgaaactagttttttctcgagtagctagagaattcttaagccagccccgacacccgccaacacccgctgacgcgccctgacgggcttgtctgctcccggcatccgcttacagacaagctgtgaccgtctccgggagctgcatgtgtcagaggttttcaccgtcatcaccgaaacgcgcgagacgaaagggcctcgtgatacgcctatttttataggttaatgtcatgataataatggtttcttagacgtcaggtggcacttttcggggaaatgtgaagcttcgcggaacccctatttgtttatttttctaaatacattcaaatatgtatccgctcatgagacaataaccctgataaatgcttcaataatattgaaaaaggaagagtatgagtattcaacatttccgtgtcgcccttattcccttttttgcggcattttgccttcctgtttttgctcacccagaaacgctggtgaaagtaaaagatgctgaagatcagttgggtgcacgagtgggttacatcgaactggatctcaacagcggtaagatccttgagagttttcgccccgaagaacgttttccaatgatgagcacttttaaagttctgctatgtggcgcggtattatcccgtattgacgccgggcaagagcaactcggtcgccgcatacactattctcagaatgacttggttgagtactcaccagtcacagaaaagcatcttacggatggcatgacagtaagagaattatgcagtgctgccataaccatgagtgataacactgcggccaacttacttctgacaacgatcggaggaccgaaggagctaaccgcttttttgcacaacatgggggatcatgtaactcgccttgatcgttgggaaccggagctgaatgaagccataccaaacgacgagcgtgacaccacgatgcctgtagcaatggcaacaacgttgcgcaaactattaactggcgaactacttactctagcttcccggcaacaattaatagactggatggaggcggataaagttgcaggaccacttctgcgctcggcccttccggctggctggtttattgctgataaatctggagccggtgagcgtgggtctcgcggtatcattgcagcactggggccagatggtaagccctcccgtatcgtagttatctacacgacggggagtcaggcaactatggatgaacgaaatagacagatcgctgagataggtgcctcactgattaagcattggtaaaagcttctgtcagaccaagtttactcatatatactttagattgatttaaaacttcatttttaatttaaaaggatctaggtgaagatcctttatggtgaaggatgcgccacaggatactggcgcgcatacacagcacatctctttgcaggaaaaaaacgctatgaaaaatgttggttttatcggctggcgcggaatggtcggctctgttctcatgcaacgcatggtagaggagcgcgatttcgacgctattcgccctgttttcttttctacctcccagtttggacaggcggcgcccaccttcggcgacacctccaccggcacgctacaggacgcttttgatctggatgcgctaaaagcgctcgatatcatcgtgacctgccagggcggcgattataccaacgaaatttatccaaagctgcgcgaaagcggatggcagggttactggattgatgcggcttctacgctgcgcatgaaagatgatgccattattattctcgacccggtcaaccaggacgtgattaccgacggcctgaacaatggcgtgaagacctttgtgggcggtaactgtaccgttagcctgatgttgatgtcgctgggcggtctctttgcccataatctcgttgactgggtatccgtcgcgacctatcaggccgcctccggcggcggcgcgcgccatatgcgcgagctgttaacccagatgggtcagttgtatggccatgtcgccgatgaactggcgacgccgtcttccgcaattcttgatattgaacgcaaagttacggcattgacccgcagcggcgagctgccggttgataactttggcgtaccgctggcgggaagcctgatcccctggatcgacaaacagctcgataacggccagagccgcgaagagtggaaaggccaggcggaaaccaacaagattctcaatactgcctctgtgattccggttgatggtttgtgtgtgcgcgtcggcgcgctgcgctgtcacagccaggcgttcaccatcaagctgaaaaaagaggtatccattccgacggtggaagaactgctggcggcacataatccgtgggcgaaagtggtgccgaacgatcgtgatatcactatgcgcgaattaaccccggcggcggtgaccggcacgttgactacgccggttggtcgtctgcgtaagctgaacatggggccagagttcttgtcggcgtttaccgtaggcgaccagttgttatggggcgccgccgagccgctgcgtcgaatgctgcgccagttggcgtagttgataatctcatgaccaaaatcccttaacgtgagttttcgttccactgagcgtcagaccccgtagaaaagatcaaaggatcttcttgagatcctttttttctgcgcgtaatctgctgcttgcaaacaaaaaaaccaccgctaccagcggtggtttgtttgccggatcaagagctaccaactctttttccgaaggtaactggcttcagcagagcgcagataccaaatactgttcttctagtgtagccgtagttaggccaccacttcaagaactctgtagcaccgcctacatacctcgctctgctaatcctgttaccagtggctgctgccagtggcgataagtcgtgtcttaccgggttggactcaagacgatagttaccggataaggcgcagcggtcgggctgaacggggggttcgtgcacacagcccagcttggagcgaacgacctacaccgaactgagatacctacagcgtgagctatgagaaagcgccacgcttcccgaagggagaaaggcggacaggtatccggtaagcggcagggtcggaacaggagagcgcacgagggagcttccagggggaaacgcctggtatctttatagtcctgtcgggtttcgccacctctgacttgagcgtcgatttttgtgatgctcgtcaggggggcggagcctatggaaaaacgccagcaacgcggcctttttacggttcctggccttttgctggccttttgctcacatgttctttcctgcgttatcccctgattctgtggataaccgtattaccgcctttgagtgagctgataccgctcgccgcagccgaacgaccgagcgcagcgagtcagtgagcgaggaagcggaaga

SEQ ID NO: 226 - DNA, 26 bp, Artificial Sequence
  APR-001 Kan PrimerF
aaaaaagcttgcagctctggcccgtg

SEQ ID NO: 227 - DNA, 38 bp, Artificial Sequence
  APR-002 Kan PrimerR
aaaaaagcttttagaaaaactcatcgagcatcaaatga

SEQ ID NO: 228 - DNA, 28 bp, Artificial Sequence
  APR-003 pATI ori T148CF
acactagaaggacagtatttggtatctg

SEQ ID NO: 229 - DNA, 18 bp, Artificial Sequence
  APR-004 pATI ori T148CR
agccgtagttaggccacc

SEQ ID NO: 230 - DNA, 3203 bp, Artificial Sequence
  pSL0147 plasmid
gacgaaagggcctcgtgatacgcctatttttataggttaatgtcatgataataatggtttcttagacgtcaggtggcacttttcggggaaatgtgcgcggaacccctatttgtttatttttctaaatacattcaaatatgtatccgctcatgagacaataaccctgataaatgcttcaataatattgaaaaaggaagagtatgagtattcaacatttccgtgtcgcccttattcccttttttgcggcattttgccttcctgtttttgctcacccagaaacgctggtgaaagtaaaagatgctgaagatcagttgggtgcacgagtgggttacatcgaactggatctcaacagcggtaagatccttgagagttttcgccccgaagaacgttttccaatgatgagcacttttaaagttctgctatgtggcgcggtattatcccgtattgacgccgggcaagagcaactcggtcgccgcatacactattctcagaatgacttggttgagtactcaccagtcacagaaaagcatcttacggatggcatgacagtaagagaattatgcagtgctgccataaccatgagtgataacactgcggccaacttacttctgacaacgatcggaggaccgaaggagctaaccgcttttttgcacaacatgggggatcatgtaactcgccttgatcgttgggaaccggagctgaatgaagccataccaaacgacgagcgtgacaccacgatgcctgtagcaatggcaacaacgttgcgcaaactattaactggcgaactacttactctagcttcccggcaacaattaatagactggatggaggcggataaagttgcaggaccacttctgcgctcggcccttccggctggctggtttattgctgataaatctggagccggtgagcgtgggtctcgcggtatcattgcagcactggggccagatggtaagccctcccgtatcgtagttatctacacgacggggagtcaggcaactatggatgaacgaaatagacagatcgctgagataggtgcctcactgattaagcattggtaactgtcagaccaagtttactcatatatactttagattgatttaaaacttcatttttaatttaaaaggatctaggtgaagatcctttttgataatctcatgaccaaaatcccttaacgtgagttttcgttccactgagcgtcagaccccgtagaaaagatcaaaggatcttcttgagatcctttttttctgcgcgtaatctgctgcttgcaaacaaaaaaaccaccgctaccagcggtggtttgtttgccggatcaagagctaccaactctttttccgaaggtaactggcttcagcagagcgcagataccaaatactgttcttctagtgtagccgtagttaggccaccacttcaagaactctgtagcaccgcctacatacctcgctctgctaatcctgttaccagtggctgctgccagtggcgataagtcgtgtcttaccgggttggactcaagacgatagttaccggataaggcgcagcggtcgggctgaacggggggttcgtgcacacagcccagcttggagcgaacgacctacaccgaactgagatacctacagcgtgagctatgagaaagcgccacgcttcccgaagggagaaaggcggacaggtatccggtaagcggcagggtcggaacaggagagcgcacgagggagcttccagggggaaacgcctggtatctttatagtcctgtcgggtttcgccacctctgacttgagcgtcgatttttgtgatgctcgtcaggggggcggagcctatggaaaaacgccagcaacgcggcctttttacggttcctggccttttgctggccttttgctcacatgttctttcctgcgttatcccctgattctgtggataaccgtattaccgcctttgagtgagctgataccgctcgccgcagccgaacgaccgagcgcagcgagtcagtgagcgaggaagcggaagagcgcccaatacgcaaaccgcctctccccgcgcgttggccgattcattaatgcagctggcacgacaggtttcccgactggaaagcgggcagtgagcgcaacgcaattaatgtgagttagctcactcattaggcaccccaggctttacactttatgcttccggctcgtatgttgtgtggaattgtgagcggataacaatttcacacaggaaacagctatgaccatgattacgccaagctcggcgcgccattgggatggaacgcgttatcggcaatctggaggcaaagtttaatgataattttgcaaaaataatgcgcggaataatgatgcataaagcggctatttcgccgcctaagaaaaagatcgggggaagtgaaaaattttctaaagttcgaaattcaggtgccgatacaagggttacggtgagaaaccgtgggcaacagcccaataacatcaagttgtaattgataaggaaaagatcatgggctagcctcaataagcttcttgcctttctgcagaccaaggacccagattatgttgcagcaggccggtacctccgttctggcgcaggcgaaccaggttccgcaaaacgtcctctctttactgcgttaatccggcgattgattcaccgacacgtggtacacaatcaaggcagcgaaagctgccttttttaattccggagcctgtgtaatgaaagaaatcaccgtcactgaacctgcctttgtcacccgcttttcctgttctggctcggcctgtcgcgaccactgttgtaagggctggaaagttccatcccaatacgcgtcaattcactggccgtcgttttacaacgtcgtgactgggaaaaccctggcgttacccaacttaatcgccttgcagcacatccccctttcgccagctggcgtaatagcgaagaggcccgcaccgatcgcccttcccaacagttgcgcagcctgaatggcgaatggcgcctgatgcggtattttctccttacgcatctgtgcggtatttcacaccgcatatggtgcactctcagtacaatctgctctgatgccgcatagttaagccagccccgacacccgccaacacccgctgacgcgccctgacgggcttgtctgctcccggcatccgcttacagacaagctgtgaccgtctccgggagctgcatgtgtcagaggttttcaccgtcatcaccgaaacgcgcga

SEQ ID NO: 231 - DNA, 3196 bp, Artificial Sequence
  pSL0148 plasmid
gacgaaagggcctcgtgatacgcctatttttataggttaatgtcatgataataatggtttcttagacgtcaggtggcacttttcggggaaatgtgcgcggaacccctatttgtttatttttctaaatacattcaaatatgtatccgctcatgagacaataaccctgataaatgcttcaataatattgaaaaaggaagagtatgagtattcaacatttccgtgtcgcccttattcccttttttgcggcattttgccttcctgtttttgctcacccagaaacgctggtgaaagtaaaagatgctgaagatcagttgggtgcacgagtgggttacatcgaactggatctcaacagcggtaagatccttgagagttttcgccccgaagaacgttttccaatgatgagcacttttaaagttctgctatgtggcgcggtattatcccgtattgacgccgggcaagagcaactcggtcgccgcatacactattctcagaatgacttggttgagtactcaccagtcacagaaaagcatcttacggatggcatgacagtaagagaattatgcagtgctgccataaccatgagtgataacactgcggccaacttacttctgacaacgatcggaggaccgaaggagctaaccgcttttttgcacaacatgggggatcatgtaactcgccttgatcgttgggaaccggagctgaatgaagccataccaaacgacgagcgtgacaccacgatgcctgtagcaatggcaacaacgttgcgcaaactattaactggcgaactacttactctagcttcccggcaacaattaatagactggatggaggcggataaagttgcaggaccacttctgcgctcggcccttccggctggctggtttattgctgataaatctggagccggtgagcgtgggtctcgcggtatcattgcagcactggggccagatggtaagccctcccgtatcgtagttatctacacgacggggagtcaggcaactatggatgaacgaaatagacagatcgctgagataggtgcctcactgattaagcattggtaactgtcagaccaagtttactcatatatactttagattgatttaaaacttcatttttaatttaaaaggatctaggtgaagatcctttttgataatctcatgaccaaaatcccttaacgtgagttttcgttccactgagcgtcagaccccgtagaaaagatcaaaggatcttcttgagatcctttttttctgcgcgtaatctgctgcttgcaaacaaaaaaaccaccgctaccagcggtggtttgtttgccggatcaagagctaccaactctttttccgaaggtaactggcttcagcagagcgcagataccaaatactgttcttctagtgtagccgtagttaggccaccacttcaagaactctgtagcaccgcctacatacctcgctctgctaatcctgttaccagtggctgctgccagtggcgataagtcgtgtcttaccgggttggactcaagacgatagttaccggataaggcgcagcggtcgggctgaacggggggttcgtgcacacagcccagcttggagcgaacgacctacaccgaactgagatacctacagcgtgagctatgagaaagcgccacgcttcccgaagggagaaaggcggacaggtatccggtaagcggcagggtcggaacaggagagcgcacgagggagcttccagggggaaacgcctggtatctttatagtcctgtcgggtttcgccacctctgacttgagcgtcgatttttgtgatgctcgtcaggggggcggagcctatggaaaaacgccagcaacgcggcctttttacggttcctggccttttgctggccttttgctcacatgttctttcctgcgttatcccctgattctgtggataaccgtattaccgcctttgagtgagctgataccgctcgccgcagccgaacgaccgagcgcagcgagtcagtgagcgaggaagcggaagagcgcccaatacgcaaaccgcctctccccgcgcgttggccgattcattaatgcagctggcacgacaggtttcccgactggaaagcgggcagtgagcgcaacgcaattaatgtgagttagctcactcattaggcaccccaggctttacactttatgcttccggctcgtatgttgtgtggaattgtgagcggataacaatttcacacaggaaacagctatgaccatgattacgccaagctcggcgcgccattgggatggaacttccagacgacaagagtatcgcctttatttacatactttaacgctcgtttcaggccggggcggtttgcaatcttgccactgatacggtcctcaaaaatgcggtcacaatttgcactagtaagcgcattacgctgtaaatcgatattttggtcaattgttgacacccgaatatacccaatagtagccatgattttctcctttacatcagataaggaagaattttagtcgcttttctcatggaggattgctgctagcctcaataagcttcttgcctttctgcagaccaaggacccagattatgtatggaatgtatggctgtaaatgatatttcctacgggcgagaagctgaaatatggccgcgggattattctatgcttgctcgtcgagttcaatttctacgttttaatgatatccctgttcgattggtgagtaataatgcccggataatcacaggctacattgcgaagtttaatccgaaggaaaatttgattctggcttcggataaacctaaaggagttccatcccaatacgcgtcaattcactggccgtcgttttacaacgtcgtgactgggaaaaccctggcgttacccaacttaatcgccttgcagcacatccccctttcgccagctggcgtaatagcgaagaggcccgcaccgatcgcccttcccaacagttgcgcagcctgaatggcgaatggcgcctgatgcggtattttctccttacgcatctgtgcggtatttcacaccgcatatggtgcactctcagtacaatctgctctgatgccgcatagttaagccagccccgacacccgccaacacccgctgacgcgccctgacgggcttgtctgctcccggcatccgcttacagacaagctgtgaccgtctccgggagctgcatgtgtcagaggttttcaccgtcatcaccgaaacgcgcga

SEQ ID NO: 232 - DNA, 21 bp, Artificial Sequence
  flic-1 primer
cgttatcggcaatctggaggc

SEQ ID NO: 233 - DNA, 21 bp, Artificial Sequence
  flic-2 primer
ccagcccttacaacagtggtc

SEQ ID NO: 234 - DNA, 24 bp, Artificial Sequence
  flic-3 primer
gtctgtcaacaactggtctaacgg

SEQ ID NO: 235 - DNA, 23 bp, Artificial Sequence
  flic-4 primer
agacggtcctcatccagataagg

SEQ ID NO: 236 - DNA, 22 bp, Artificial Sequence
  fljb-1 primer sequence
ttccagacgacaagagtatcgc

SEQ ID NO: 237 - DNA, 27 bp, Artificial Sequence
  fljb-2 primer
cctttaggtttatccgaagccagaatc

SEQ ID NO: 238 - DNA, 20 bp, Artificial Sequence
  fljb-3 primer
caccaggtttttcacgctgc

SEQ ID NO: 239 - DNA, 20 bp, Artificial Sequence
  fljb-4 primer
acacgcatttacgcctgtcg

SEQ ID NO: 240 - DNA, 1518 bp, Artificial Sequence
  cytoLLO ORF
atgaaagacgcctccgcgtttaacaaggagaactccatcagctccatggccccgcccgcttccccgccggcgagccctaaaaccccgatcgagaaaaagcacgccgacgagattgacaaatatattcaaggtttagactacaataagaacaacgtgctggtgtatcacggcgatgcggtgaccaatgttccgccgcgcaagggctacaaagatggtaacgaatatatcgtggttgagaaaaagaaaaaaagcatcaaccagaacaacgccgatatccaagttgtgaacgccatcagctctttaacctatccgggcgcgctggtgaaagccaacagcgaactggtggaaaaccagcccgatgtgctgccggtgaaacgcgattctttaacgctgagcattgatttaccgggcatgacgaaccaagataacaaaatcgtggtgaagaacgcgaccaagtccaacgtgaacaacgcggtgaacacgctggtggaacgctggaacgaaaaatacgcccaagcttacccgaacgtgagcgcgaagattgactacgacgacgaaatggcctacagcgagagccagctgatcgcgaaattcggcaccgcgttcaaagcggtgaacaactctttaaacgtgaactttggcgcgatcagcgaaggcaaaatgcaagaagaggtgatcagctttaaacaaatctattataacgtgaatgttaacgagccgacgcgtccgagccgctttttcggcaaagcggtgacgaaggaacagctgcaagcgcttggcgtgaacgcggaaaaccctccggcctatatttccagcgtggcgtatggccgccaagtttatctgaagctgagcacgaacagccacagcaccaaagttaaggcggcctttgatgcggcggtgagcggcaaaagcgttagcggcgacgttgagctgacgaacatcatcaagaacagctcctttaaagcggtgatctatggcggtagcgcgaaagacgaagtgcagatcatcgacggcaatttaggtgatctgcgcgatattttaaaaaagggcgccaccttcaaccgtgagacgcccggtgtgccgatcgcctacaccaccaactttttaaaggataacgagctggccgtgatcaaaaacaattccgaatatatcgaaaccacgagcaaggcgtataccgatggcaagatcaacattgaccacagcggtggctatgtggcgcagttcaacatcagctgggatgaagtgaactatgatccggagggcaacgagatcgtgcagcacaagaactggtccgagaacaacaaatccaagctggcgcatttcaccagcagcatctatctgccgggcaacgcgcgcaacattaatgtgtacgcgaaagagtgcacgggtcttgcgtgggaatggtggcgcaccgtgatcgatgatcgcaatttaccgctggtgaaaaaccgcaacatctccatctggggcaccactttatacccgaaatattccaacaaagttgataaccctattgag

SEQ ID NO: 241 - DNA, 45 bp, Artificial Sequence
  LLO promoter
attatgtcttgacatgtagtgagtgggctggtataatgcagcaag

SEQ ID NO: 242 - DNA, 1176 bp, Artificial Sequence
  Asd Gene ORF
ctacgccaactggcgcagcattcgacgcagcggctcggcggcgccccataacaactggtcgcctacggtaaacgccgacaagaactctggccccatgttcagcttacgcagacgaccaaccggcgtagtcaacgtgccggtcaccgccgccggggttaattcgcgcatagtgatatcacgatcgttcggcaccactttcgcccacggattatgtgccgccagcagttcttccaccgtcggaatggatacctcttttttcagcttgatggtgaacgcctggctgtgacagcgcagcgcgccgacgcgcacacacaaaccatcaaccggaatcacagaggcagtattgagaatcttgttggtttccgcctggcctttccactcttcgcggctctggccgttatcgagctgtttgtcgatccaggggatcaggcttcccgccagcggtacgccaaagttatcaaccggcagctcgccgctgcgggtcaatgccgtaactttgcgttcaatatcaagaattgcggaagacggcgtcgccagttcatcggcgacatggccatacaactgacccatctgggttaacagctcgcgcatatggcgcgcgccgccgccggaggcggcctgataggtcgcgacggatacccagtcaacgagattatgggcaaagagaccgcccagcgacatcaacatcaggctaacggtacagttaccgcccacaaaggtcttcacgccattgttcaggccgtcggtaatcacgtcctggttgaccgggtcgagaataataatggcatcatctttcatgcgcagcgtagaagccgcatcaatccagtaaccctgccatccgctttcgcgcagctttggataaatttcgttggtataatcgccgccctggcaggtcacgatgatatcgagcgcttttagcgcatccagatcaaaagcgtcctgtagcgtgccggtggaggtgtcgccgaaggtgggcgccgcctgtccaaactgggaggtagaaaagaaaacagggcgaatagcgtcgaaatcgcgctcctctaccatgcgttgcatgagaacagagccgaccattccgcgccagccgataaaaccaacatttttcatagcgtttttttcctgcaaagagatgtgctgtgtatgcgcgccagtatcctgtggcgcatccttcaccat

SEQ ID NO: 243 - DNA, 589 bp, Artificial Sequence
  pBR322 Origin
ttgagatcctttttttctgcgcgtaatctgctgcttgcaaacaaaaaaaccaccgctaccagcggtggtttgtttgccggatcaagagctaccaactctttttccgaaggtaactggcttcagcagagcgcagataccaaatactgtccttctagtgtagccgtagttaggccaccacttcaagaactctgtagcaccgcctacatacctcgctctgctaatcctgttaccagtggctgctgccagtggcgataagtcgtgtcttaccgggttggactcaagacgatagttaccggataaggcgcagcggtcgggctgaacggggggttcgtgcacacagcccagcttggagcgaacgacctacaccgaactgagatacctacagcgtgagctatgagaaagcgccacgcttcccgaagggagaaaggcggacaggtatccggtaagcggcagggtcggaacaggagagcgcacgagggagcttccagggggaaacgcctggtatctttatagtcctgtcgggtttcgccacctctgacttgagcgtcgatttttgtgatgctcgtcaggggggcggagcctatggaaa

SEQ ID NO: 244 - DNA, 3269 bp, Artificial Sequence
  pEQU6 shSCR
ctttcctgcgttatcccctgattctgtggataaccgtattaccgcctttgagtgagctgataccgctcgccgcagccgaacgaccgagcgcagcgagtcagtgagcgaggaagcggaagagcgcccaatacgcaaaccgcctctccccgcgcgttggccgattcattaatgcagctggcacgacaggtttcccgactggaaagcgggcagtgagcgcaacgcaattaatacgcgtaccgctagccaggaagagtttgtagaaacgcaaaaaggccatccgtcaggatggccttctgcttagtttgatgcctggcagtttatggcgggcgtcctgcccgccaccctccgggccgttgcttcacaacgttcaaatccgctcccggcggatttgtcctactcaggagagcgttcaccgacaaacaacagataaaacgaaaggcccagtcttccgactgagcctttcgttttatttgatgcctggcagttccctactctcgcgttaacgctagcatggatgttttcccagtcacgacgttgtaaaacgacggccagtcttaagctcgggccccaaataatgattttattttgactgatagtgacctgttcgttgcaacaaattgatgagcaatgcttttttataatgccaactttgtacaaaaaagcaggctttaaaggaaccaattcagtcgactggatccaaggtcgggcaggaagagggcctatttcccatgattccttcatatttgcatatacgatacaaggctgttagagagataattagaattaatttgactgtaaacacaaagatattagtacaaaatacgtgacgtagaaagtaataatttcttgggtagtttgcagttttaaaattatgttttaaaatggactatcatatgcttaccgtaacttgaaagtatttcgatttcttggctttatatatcttgtggaaaggacgaaactagcaacaagatgaagagcaccaattctagagattggtgctcttcatcttgttgttttttcgagtagctagagaattcatggtaatagcgatgactaatacgtagatgtactgccaagtaggaaagtcccataaggtcatgtactgggcataatgccaggcgggccatttaccgtcattgacgtcaatagggggcgtacttggcatatgatacacttgatgtactgccaagtgggcagtttaccgtaaatagtccacccattgacgtcaatggaaagtccctattggcgttactatgggaacatacgtcattattgacgtcaatgggcgggggtcgttgggcggtcagccaggcgggccatttaccgtaagttatgtaacgcggaactccatatatgggctatgaactaatgaccccgtaattgattactattaataactagacccagctttcttgtacaaagttggcattataagaaagcattgcttatcaatttgttgcaacgaacaggtcactatcagtcaaaataaaatcattatttgccatccagctgatatcccctatagtgagtcgtattacatggtcatagctgtttcctggcagctctggcccgtgtctcaaaatctctgatgttacattgcacaagataaaaatatatcatcatgaacaataaaactgtctgcttacataaacagtaatacaaggggtgttatgagccatattcaacgggaaacgtcgaggccgcgattaaattccaacatggatgctgatttatatgggtataaatgggctcgcgataatgtcgggcaatcaggtgcgacaatctatcgcttgtatgggaagcccgatgcgccagagttgtttctgaaacatggcaaaggtagcgttgccaatgatgttacagatgagatggtcagactaaactggctgacggaatttatgcctcttccgaccatcaagcattttatccgtactcctgatgatgcatggttactcaccactgcgatccccggaaaaacagcattccaggtattagaagaatatcctgattcaggtgaaaatattgttgatgcgctggcagtgttcctgcgccggttgcattcgattcctgtttgtaattgtccttttaacagcgatcgcgtatttcgtctcgctcaggcgcaatcacgaatgaataacggtttggttgatgcgagtgattttgatgacgagcgtaatggctggcctgttgaacaagtctggaaagaaatgcataaacttttgccattctcaccggattcagtcgtcactcatggtgatttctcacttgataaccttatttttgacgaggggaaattaataggttgtattgatgttggacgagtcggaatcgcagaccgataccaggatcttgccatcctatggaactgcctcggtgagttttctccttcattacagaaacggctttttcaaaaatatggtattgataatcctgatatgaataaattgcagtttcatttgatgctcgatgagtttttctaatcagaattggttaattggttgtaacactggcagagcattacgctgacttgacgggacggcgcaagctcatgaccaaaatcccttaacgtgagttacgcgtcgttccactgagcgtcagaccccgtagaaaagatcaaaggatcttcttgagatcctttttttctgcgcgtaatctgctgcttgcaaacaaaaaaaccaccgctaccagcggtggtttgtttgccggatcaagagctaccaactctttttccgaaggtaactggcttcagcagagcgcagataccaaatactgtccttctagtgtagccgtagttaggccaccacttcaagaactctgtagcaccgcctacatacctcgctctgctaatcctgttaccagtggctgctgccagtggcgataagtcgtgtcttaccgggttggactcaagacgatagttaccggataaggcgcagcggtcgggctgaacggggggttcgtgcacacagcccagcttggagcgaacgacctacaccgaactgagatacctacagcgtgagcattgagaaagcgccacgcttcccgaagggagaaaggcggacaggtatccggtaagcggcagggtcggaacaggagagcgcacgagggagcttccagggggaaacgcctggtatctttatagtcctgtcgggtttcgccacctctgacttgagcgtcgatttttgtgatgctcgtcaggggggcggagcctatggaaaaacgccagcaacgcggcctttttacggttcctggccttttgctggccttttgct

SEQ ID NO: 245 - DNA, 4642 bp, Artificial Sequence
  pATI2.0 U6-H1 Plasmid
accggtctgtggaatgtgtgtcagttagggtgtggaaagtccccaggctccccagcaggcagaagtatgcaaagcatgcatctcaattagtcagcaaccaaccggtcttgcacctcagcaaaaggccatccgtcaggatggccttctgcttagtttgatgcctggcagtttatggcgggcgtcctgcccgccaccctccgggccgttgcttcacaacgttcaaatccgctcccggcggatttgtcctactcaggagagcgttcaccgacaaacaacagataaaacgaaaggcccagtcttccgactgagcctttcgttttatttgggccggccatgcctggcagttccctactctcgcgttaacgctagcatggatgttttcccagtcacgacgttcttaagctcgggcccttaaaggaaccaattcagtcgagaattactagtggtaccatatttgcatgtcgctatgtgttctgggaaatcaccataaacgtgaaatgtctttggatttgggaatcttataagttctgtatgagaccactccctaggtttttgtcgacagatctggcgcgccgactaccaaaatgacttcggatatgaccattatggtgcccgacttcgtaatttacgcgtacccatttggatgacggtgcgtccatgtttgttctgcatgcctgagatagtaaggccgacccccaacaatccacaaggccacgattgacacatgaggttccttttttaaacctgaacctttagttcacacaggtggctgcgccgccgtgaatggtggcagtagttacttctaatcaagctcaatccctcggctctgaagaggacatagtagacctcatctggtctttcgactacggggggtaacagatgtcggtggtataacaatcctccacgagatcatttcacgtaagcatgacttttacacctatcggaatcatataactgttaggcaatggtttatgattgggcgacagacgtcagatcggcgaacctttacgtagccccccgttcatctagacaggaagagggcctatttcccatgattccttcatatttgcatatacgatacaaggctgttagagagataattagaattaatttgactgtaaacacaaagatattagtacaaaatacgtgacgtagaaagtaataatttcttgggtagtttgcagttttaaaattatgttttaaaatggactatcatatgcttaccgtaacttgaaagtatttcgatttcttggctttatatatcttgtggaaaggacgaaacttgttttttctcgagtagctagagaattcgtcgacggaactccatatatgggctatgaactaatgaccccgtaattgattactattaataactagccatccagctgatatccgccggcgctgcagctacgccaactggcgcagcattcgacgcagcggctcggcggcgccccataacaactggtcgcctacggtaaacgccgacaagaactctggccccatgttcagcttacgcagacgaccaaccggcgtagtcaacgtgccggtcaccgccgccggggttaattcgcgcatagtgatatcacgatcgttcggcaccactttcgcccacggattatgtgccgccagcagttcttccaccgtcggaatggatacctcttttttcagcttgatggtgaacgcctggctgtgacagcgcagcgcgccgacgcgcacacacaaaccatcaaccggaatcacagaggcagtattgagaatcttgttggtttccgcctggcctttccactcttcgcggctctggccgttatcgagctgtttgtcgatccaggggatcaggcttcccgccagcggtacgccaaagttatcaaccggcagctcgccgctgcgggtcaatgccgtaactttgcgttcaatatcaagaattgcggaagacggcgtcgccagttcatcggcgacatggccatacaactgacccatctgggttaacagctcgcgcatatggcgcgcgccgccgccggaggcggcctgataggtcgcgacggatacccagtcaacgagattatgggcaaagagaccgcccagcgacatcaacatcaggctaacggtacagttaccgcccacaaaggtcttcacgccattgttcaggccgtcggtaatcacgtcctggttgaccgggtcgagaataataatggcatcatctttcatgcgcagcgtagaagccgcatcaatccagtaaccctgccatccgctttcgcgcagctttggataaatttcgttggtataatcgccgccctggcaggtcacgatgatatcgagcgcttttagcgcatccagatcaaaagcgtcctgtagcgtgccggtggaggtgtcgccgaaggtgggcgccgcctgtccaaactgggaggtagaaaagaaaacagggcgaatagcgtcgaaatcgcgctcctctaccatgcgttgcatgagaacagagccgaccattccgcgccagccgataaaaccaacatttttcatagcgtttttttcctgcaaagagatgtgctgtgtatgcgcgccagtatcctgtggcgcatccttcaccataaaggatcttcacctagatccttttaaattaaaaatgaagttttaaatcaatctaaagtatatatgagtaaacttggtctgacagtctgcaggatatcccatgggcattggcgcagaaaaaaatgcctgatgcgacgctgcgcgtcttatactcccacatatgccagattcagcaacggatacggcttccccaacttgcccacttccatacgtgtcctccttaccagaaatttatccttaaccatggaagctttgcagctctggcccgtgtctcaaaatctctgatgttacattgcacaagataaaaatatatcatcatgaacaataaaactgtctgcttacataaacagtaatacaaggggtgttatgagccatattcaacgggaaacgtcgaggccgcgattaaattccaacatggatgctgatttatatgggtataaatgggctcgcgataatgtcgggcaatcaggtgcgacaatctatcgcttgtatgggaagcccgatgcgccagagttgtttctgaaacatggcaaaggtagcgttgccaatgatgttacagatgagatggtcagactaaactggctgacggaatttatgcctcttccgaccatcaagcattttatccgtactcctgatgatgcatggttactcaccactgcgatccccggaaaaacagcattccaggtattagaagaatatcctgattcaggtgaaaatattgttgatgcgctggcagtgttcctgcgccggttgcattcgattcctgtttgtaattgtccttttaacagcgatcgcgtatttcgtctcgctcaggcgcaatcacgaatgaataacggtttggttgatgcgagtgattttgatgacgagcgtaatggctggcctgttgaacaagtctggaaagaaatgcataaacttttgccattctcaccggattcagtcgtcactcatggtgatttctcacttgataaccttatttttgacgaggggaaattaataggttgtattgatgttggacgagtcggaatcgcagaccgataccaggatcttgccatcctatggaactgcctcggtgagttttctccttcattacagaaacggctttttcaaaaatatggtattgataatcctgatatgaataaattgcagtttcatttgatgctcgatgagtttttctaaagctttcagaattggttaattggttgtaacactggcagagcattacgctgacttgacgggacggcgcaagctcatggatcccaattggcggccgcttaattaaacatgtgagctcgatgtacattcgaaggaccccaaaatcccttaacgtgagttacgcgtcgttccactgagcgtcagaccccgtagaaaagatcaaaggatcttcatcgatttgagatcctttttttctgcgcgtaatctgctgcttgcaaacaaaaaaaccaccgctaccagcggtggtttgtttgccggatcaagagctaccaactctttttccgaaggtaactggcttcagcagagcgcagataccaaatactgtccttctagtgtagccgtagttaggccaccacttcaagaactctgtagcaccgcctacatacctcgctctgctaatcctgttaccagtggctgctgccagtggcgataagtcgtgtcttaccgggttggactcaagacgatagttaccggataaggcgcagcggtcgggctgaacggggggttcgtgcacacagcccagcttggagcgaacgacctacaccgaactgagatacctacagcgtgagctatgagaaagcgccacgcttcccgaagggagaaaggcggacaggtatccggtaagcggcagggtcggaacaggagagcgcacgagggagcttccagggggaaacgcctggtatctttatagtcctgtcgggtttcgccacctctgacttgagcgtcgatttttgtgatgctcgtcaggggggcggagcctatggaaaatcgattccggaaacgccaggctcttccaacgcggcctttttacggttgaagagccctggccttttgctggccttttgct

SEQ ID NO: 246 - DNA, 1261 bp, Artificial Sequence
  ASD gene orf + 85 bp upstream
ctgtcagaccaagtttactcatatatactttagattgatttaaaacttcatttttaatttaaaaggatctaggtgaagatcctttatggtgaaggatgcgccacaggatactggcgcgcatacacagcacatctctttgcaggaaaaaaacgctatgaaaaatgttggttttatcggctggcgcggaatggtcggctctgttctcatgcaacgcatggtagaggagcgcgatttcgacgctattcgccctgttttcttttctacctcccagtttggacaggcggcgcccaccttcggcgacacctccaccggcacgctacaggacgcttttgatctggatgcgctaaaagcgctcgatatcatcgtgacctgccagggcggcgattataccaacgaaatttatccaaagctgcgcgaaagcggatggcagggttactggattgatgcggcttctacgctgcgcatgaaagatgatgccattattattctcgacccggtcaaccaggacgtgattaccgacggcctgaacaatggcgtgaagacctttgtgggcggtaactgtaccgttagcctgatgttgatgtcgctgggcggtctctttgcccataatctcgttgactgggtatccgtcgcgacctatcaggccgcctccggcggcggcgcgcgccatatgcgcgagctgttaacccagatgggtcagttgtatggccatgtcgccgatgaactggcgacgccgtcttccgcaattcttgatattgaacgcaaagttacggcattgacccgcagcggcgagctgccggttgataactttggcgtaccgctggcgggaagcctgatcccctggatcgacaaacagctcgataacggccagagccgcgaagagtggaaaggccaggcggaaaccaacaagattctcaatactgcctctgtgattccggttgatggtttgtgtgtgcgcgtcggcgcgctgcgctgtcacagccaggcgttcaccatcaagctgaaaaaagaggtatccattccgacggtggaagaactgctggcggcacataatccgtgggcgaaagtggtgccgaacgatcgtgatatcactatgcgcgaattaaccccggcggcggtgaccggcacgttgactacgccggttggtcgtctgcgtaagctgaacatggggccagagttcttgtcggcgtttaccgtaggcgaccagttgttatggggcgccgccgagccgctgcgtcgaatgctgcgccagttggcgtag

SEQ ID NO: 247 - DNA, 4112 bp, Artificial Sequence
  pATI2.0 synthetic v26 scramble pBR322ori.dna
accggtctgtggaatgtgtgtcagttagggtgtggaaagtccccaggctccccagcaggcagaagtatgcaaagcatgcatctcaattagtcagcaaccaaccggtcttgcacctcagcaaaaggccatccgtcaggatggccttctgcttagtttgatgcctggcagtttatggcgggcgtcctgcccgccaccctccgggccgttgcttcacaacgttcaaatccgctcccggcggatttgtcctactcaggagagcgttcaccgacaaacaacagataaaacgaaaggcccagtcttccgactgagcctttcgttttatttgggccggccatgcctggcagttccctactctcgcgttaacgctagcatggatgttttcccagtcacgacgttcttaagctcgggcccttaaaggaaccaattcagtcgagaattactagtggtacccaggaagagggcctatttcccatgattccttcatatttgcatatacgatacaaggctgttagagagataattagaattaatttgactgtaaacacaaagatattagtacaaaatacgtgacgtagaaagtaataatttcttgggtagtttgcagttttaaaattatgttttaaaatggactatcatatgcttaccgtaacttgaaagtatttcgatttcttggctttatatatcttgtggaaaggacgaaactagcaacaagatgaagagcaccaattctagagattggtgctcttcatcttgttgtttttctcgagtagctagagaattcgtcgacggaactccatatatgggctatgaactaatgaccccgtaattgattactattaataactagccatccagctgatatccgccggcgctgcagctacgccaactggcgcagcattcgacgcagcggctcggcggcgccccataacaactggtcgcctacggtaaacgccgacaagaactctggccccatgttcagcttacgcagacgaccaaccggcgtagtcaacgtgccggtcaccgccgccggggttaattcgcgcatagtgatatcacgatcgttcggcaccactttcgcccacggattatgtgccgccagcagttcttccaccgtcggaatggatacctcttttttcagcttgatggtgaacgcctggctgtgacagcgcagcgcgccgacgcgcacacacaaaccatcaaccggaatcacagaggcagtattgagaatcttgttggtttccgcctggcctttccactcttcgcggctctggccgttatcgagctgtttgtcgatccaggggatcaggcttcccgccagcggtacgccaaagttatcaaccggcagctcgccgctgcgggtcaatgccgtaactttgcgttcaatatcaagaattgcggaagacggcgtcgccagttcatcggcgacatggccatacaactgacccatctgggttaacagctcgcgcatatggcgcgcgccgccgccggaggcggcctgataggtcgcgacggatacccagtcaacgagattatgggcaaagagaccgcccagcgacatcaacatcaggctaacggtacagttaccgcccacaaaggtcttcacgccattgttcaggccgtcggtaatcacgtcctggttgaccgggtcgagaataataatggcatcatctttcatgcgcagcgtagaagccgcatcaatccagtaaccctgccatccgctttcgcgcagctttggataaatttcgttggtataatcgccgccctggcaggtcacgatgatatcgagcgcttttagcgcatccagatcaaaagcgtcctgtagcgtgccggtggaggtgtcgccgaaggtgggcgccgcctgtccaaactgggaggtagaaaagaaaacagggcgaatagcgtcgaaatcgcgctcctctaccatgcgttgcatgagaacagagccgaccattccgcgccagccgataaaaccaacatttttcatagcgtttttttcctgcaaagagatgtgctgtgtatgcgcgccagtatcctgtggcgcatccttcaccataaaggatcttcacctagatccttttaaattaaaaatgaagttttaaatcaatctaaagtatatatgagtaaacttggtctgacagtctgcaggatatcccatgggcattggcgcagaaaaaaatgcctgatgcgacgctgcgcgtcttatactcccacatatgccagattcagcaacggatacggcttccccaacttgcccacttccatacgtgtcctccttaccagaaatttatccttaaccatggaagctttgcagctctggcccgtgtctcaaaatctctgatgttacattgcacaagataaaaatatatcatcatgaacaataaaactgtctgcttacataaacagtaatacaaggggtgttatgagccatattcaacgggaaacgtcgaggccgcgattaaattccaacatggatgctgatttatatgggtataaatgggctcgcgataatgtcgggcaatcaggtgcgacaatctatcgcttgtatgggaagcccgatgcgccagagttgtttctgaaacatggcaaaggtagcgttgccaatgatgttacagatgagatggtcagactaaactggctgacggaatttatgcctcttccgaccatcaagcattttatccgtactcctgatgatgcatggttactcaccactgcgatccccggaaaaacagcattccaggtattagaagaatatcctgattcaggtgaaaatattgttgatgcgctggcagtgttcctgcgccggttgcattcgattcctgtttgtaattgtccttttaacagcgatcgcgtatttcgtctcgctcaggcgcaatcacgaatgaataacggtttggttgatgcgagtgattttgatgacgagcgtaatggctggcctgttgaacaagtctggaaagaaatgcataaacttttgccattctcaccggattcagtcgtcactcatggtgatttctcacttgataaccttatttttgacgaggggaaattaataggttgtattgatgttggacgagtcggaatcgcagaccgataccaggatcttgccatcctatggaactgcctcggtgagttttctccttcattacagaaacggctttttcaaaaatatggtattgataatcctgatatgaataaattgcagtttcatttgatgctcgatgagtttttctaaagctttcagaattggttaattggttgtaacactggcagagcattacgctgacttgacgggacggcgcaagctcatggatcccaattggcggccgcttaattaaacatgtgagctcgatgtacattcgaaggaccccaaaatcccttaacgtgagttacgcgtcgttccactgagcgtcagaccccgtagaaaagatcaaaggatcttcatcgatttgagatcctttttttctgcgcgtaatctgctgcttgcaaacaaaaaaaccaccgctaccagcggtggtttgtttgccggatcaagagctaccaactctttttccgaaggtaactggcttcagcagagcgcagataccaaatactgtccttctagtgtagccgtagttaggccaccacttcaagaactctgtagcaccgcctacatacctcgctctgctaatcctgttaccagtggctgctgccagtggcgataagtcgtgtcttaccgggttggactcaagacgatagttaccggataaggcgcagcggtcgggctgaacggggggttcgtgcacacagcccagcttggagcgaacgacctacaccgaactgagatacctacagcgtgagctatgagaaagcgccacgcttcccgaagggagaaaggcggacaggtatccggtaagcggcagggtcggaacaggagagcgcacgagggagcttccagggggaaacgcctggtatctttatagtcctgtcgggtttcgccacctctgacttgagcgtcgatttttgtgatgctcgtcaggggggcggagcctatggaaaatcgattccggaaacgccaggctcttccaacgcggcctttttacggttgaagagccctggccttttgctggccttttgct

SEQ ID NO: 248 - DNA, 165 bp, Artificial Sequence
  miR-16-2
ccggatcaacgccctaggtttatgtttggatgaactgacatacttgttccactctagcagcacgtaaatattggcgtagtgaaatatatattaaacaccaatattactgtgctgctttagtgtgacagggatacagcaactattttatcaattgtttgcgtcgac

SEQ ID NO: 249 - DNA, 165 bp, Artificial Sequence
  misc_feature (55)...(75): n may be any nucleotide
  misc_feature (97)...(117): n may be any nucleotide
  source (1)...(165): microRNA backbone where Ns represent inserted anti-sense and sense microRNAs
ccggatcaacgccctaggtttatgtttggatgaactgacatacgcgtatccgtcnnnnnnnnnnnnnnnnnnnnngtagtgaaatatatattaaacnnnnnnnnnnnnnnnnnnnnntacggtaacgcggaattcgcaactattttatcaattttttgcgtcgac

SEQ ID NO: 250 - DNA, 708 bp, Salmonella typhimurium
  endA
atgtaccgtaatttctcttttgccgctgtgttgctggccgcagcgttttcaggccaggccctggccgatggcattaacaatttttctcaggccaaagcggcgagcgtcaaagtcaatgctgacgcgcccggcagcttttactgcgggtgccaaatccgctggcagggtaaaaaaggcgtcgtagacctggagtcctgcggctataaggtgcgtaaaaacgagaatcgcgccagacgcattgagtgggagcacgttgtccccgcctggcaattcggtcatcagcgccagtgctggcaggacggcgggcgaaaaaactgcgctaaagacccggtctaccgcaaaatggaaagcgatatgcataacctgcaacccgcgattggcgaagtgaatggcgatcgcggcaactttatgtatagccagtggaacggcggcgaaggtcagtacgggcagtgcgccatgaaagtagatttcaaagcgaagctcgccgagccgcccgcccgcgcccgtggcgcaatcgcccgcacttatttttatatgcgcgaccaataccaactgaaactttcccgccaacaaacgcagctttttaacgtctgggataagcagtaccccgttaccgcctgggagtgcgagcgcgatgcgcgtatcgcgaaggtccagggtaatcataatccctatgtgcaacgcgcttgccaggcgcgaaagagctaa

SEQ ID NO: 251 - protein, 235 aa, Salmonella typhimurium
  endonuclease I (encoded by endA)
MYRNFSFAAALLAAAFSGQALADGINNFSQAKAASVKVNADAPGSFYCGCQIRWQGKKGVVDLESCGYKVRKNENRARRIEWEHVVPAWQFGHQRQCWQDGGRKNCAKDPVYRKMESDMHNLQPAIGEVNGDRGNFMYSQWNGGEGQYGQCAMKVDFKAKIAEPPARARGAIARIYFYMRDQYQLKLSRQQTQLFNVWDKQYPVTAWECERDARIAKVQGNHNPYVQRACQARKS

SEQ ID NO: 252 - DNA, 78 bp, Homo sapiens
  microRNA-103a1 (miR-103a1)
tactgccctcggcttctttacagtgctgccttgttgcatatggatcaagcagcattgtacagggctatgaaggcattg

SEQ ID NO: 253 - DNA, 71 bp, Homo sapiens
  microRNA-30a (miR-30a)
gcgactgtaaacatcctcgactggaagctgtgaagccacagatgggctttcagtcggatgtttgcagctgc

SEQ ID NO: 254 - DNA, 615 bp, Artificial Sequence
  pMB1 origin of replication
aaaggatcttcttgagatcctttttttctgcgcgtaatctgctgcttgcaaacaaaaaaaccaccgctaccagcggtggtttgtttgccggatcaagagctaccaactctttttccgaaggtaactggcttcagcagagcgcagataccaaatactgttcttctagtgtagccgtagttaggccaccacttcaagaactctgtagcaccgcctacatacctcgctctgctaatcctgttaccagtggctgctgccagtggcgataagtcgtgtcttaccgggttggactcaagacgatagttaccggataaggcgcagcggtcgggctgaacggggggttcgtgcacacagcccagcttggagcgaacgacctacaccgaactgagatacctacagcgtgagctatgagaaagcgccacgcttcccgaagggagaaaggcggacaggtatccggtaagcggcagggtcggaacaggagagcgcacgagggagcttccagggggaaacgcctggtatctttatagtcctgtcgggtttcgccacctctgacttgagcgtcgatttttgtgatgctcgtcaggggggcggagcctatggaaaaacgccagcaacgcg

SEQ ID NO: 255 - DNA, 913 bp, Artificial Sequence
  p15A origin of replication
gcgctagcggagtgtatactggcttactatgttggcactgatgagggtgtcagtgaagtgcttcatgtggcaggagaaaaaaggctgcaccggtgcgtcagcagaatatgtgatacaggatatattccgcttcctcgctcactgactcgctacgctcggtcgttcgactgcggcgagcggaaatggcttacgaacggggcggagatttcctggaagatgccaggaagatacttaacagggaagtgagagggccgcggcaaagccgtttttccataggctccgcccccctgacaagcatcacgaaatctgacgctcaaatcagtggtggcgaaacccgacaggactataaagataccaggcgtttccccctggcggctccctcgtgcgctctcctgttcctgcctttcggtttaccggtgtcattccgctgttatggccgcgtttgtctcattccacgcctgacactcagttccgggtaggcagttcgctccaagctggactgtatgcacgaaccccccgttcagtccgaccgctgcgccttatccggtaactatcgtcttgagtccaacccggaaagacatgcaaaagcaccactggcagcagccactggtaattgatttagaggagttagtcttgaagtcatgcgccggttaaggctaaactgaaaggacaagttttggtgactgcgctcctccaagccagttacctcggttcaaagagttggtagctcagagaaccttcgaaaaaccgccctgcaaggcggttttttcgttttcagagcaagagattacgcgcagaccaaaacgatctcaagaagatcatcttattaatcagataaaatatttctagatttcagtgcaatttatctcttcaaatgtagcacctgaagtcagccccatacgatataagttgt

SEQ ID NO: 256 - DNA, 223 bp, Artificial Sequence
  pSC101 origin of replication
gagttatacacagggctgggatctattctttttatctttttttattctttctttattctataaattataaccacttgaatataaacaaaaaaaacacacaaaggtctagcggaatttacagagggtctagcagaatttacaagttttccagcaaaggtctagcagaatttacagatacccacaactcaaaggaaaaggactagtaattatcattgactagccc

SEQ ID NO: 257 - DNA, 602 bp, E. coli
  ColE1 origin of replication
aggatcttcttgagatcctttttttctgcgcgtaatctgctgcttgcaaacaaaaaaaccaccgctaccaacggtggtttgtttgccggatcaagagctaccaactctttttccgaaggtaactggcttcagcagagcgcagataccaaatactgtccttctagtgtagccgtagtcgggccactacttcaagaactctgtagcaccgtttgtgccatcatcgctctgctaatccggttaccagtggctgctgccagtggcgttaaggcgtgccttaccgggttggactcaagacgatagttaccggataaggcgcagcggtcgggctgaacggggggttcgtgcacacagcccagcttggagcgaacgacctacaccgaactgagataccaacagcgtgagctatgagaaagcgccacgcttcccgaagggagaaaggcggacaggtatccggtaagcggcagggtcggaacaggagagcgcacgagggagcttccagggggaaacgcctggtatctttatagtcctgtcgggtttcgccacctctgacttgagcgtctatttttgtgatgctcgtcaggggggcggagcctatggaaaaa

SEQ ID NO: 258 - DNA, 201 bp, Pseudomonas syringae
  pPS10 origin of replication
acctgaccggcgcggaagcgctcttgatctttttttcttgtttttacttgttgttccttgttttcgtaattttaactatatgatttataagaaaaaaaagggtttaaaggggacagattcagggtttaaaggggacagattcagggtttaaaggggacagattcagggtttaaaggggacagattcaggctgatatccaca

SEQ ID NO: 259 - DNA, 617 bp, E. coli
  RK2 origin of replication
ccgggctggttgccctcgccgctgggctggcggccgtctatggccctgcaaacgcgccagaaacgccgtcgaagccgtgtgcgagacaccgcggccgccggcgttgtggataccacgcggaaaacttggccctcactgacagatgaggggcggacgttgacacttgaggggccgactcacccggcgcggcgttgacagatgaggggcaggctcgatttcggccggcgacgtggagctggccagcctcgcaaatcggcgaaaacgcctgattttacgcgagtttcccacagatgatgtggacaagcctggggataagtgccctgcggtattgacacttgaggggcgcgactactgacagatgaggggcgcgatccttgacacttgaggggcagagtgatgacagatgaggggcgcacctattgacatttgaggggctgtccacaggcagaaaatccagcatttgcaagggtttccgcccgtttttcggccaccgctaacctgtcttttaacctgcttttaaaccaatatttataaaccttgtttttaaccagggctgcgccctggcgcgtgaccgcgcacgccgaaggggggtgcccccccttctcgaaccctcccgg

SEQ ID NO: 260 - DNA, 639 bp, E. coli
  R6K alpha origin of replication
tcttacttctttgcgtagctgttaaatacagcgttgttttgataaaatcatcattatcatcgataatgctttcttcaatttttttatccttactctttaataaagcacttgctaataacttcataccttttgcaactgtcaaatttggttcatcagggtaaatgcttttaaggcatactaacaaataatcatggtcttcatcttcaactctaaactgaatttttttcatcataactcccaacaagaaccgactgtaggtcaccgggcaaacgctgaaaaataacgtcgaatgacgtcattttgcggcgtttgccctatcctgcatcgcagtagaaaatgccacaactgaaattgtgcttcagtatgtacagaaatgcaaaatctgagggatttcgtagctgaaagatcgccagtcttcgaccgtaaggataggagttgctgtaagacctgtgcggggcgttcgcttcgcgaacgggtctggcagggggcacaagcgctgtgctgtgatatatgcaaaagaagccacccacgaacgggagggcttcggcgaatcgactatagtgatctatttacccggctgattgtcgccttctagccctcgcgggcatcatgcaaccagtgcctgaatttagttatatg

SEQ ID NO: 261 - DNA, 1027 bp, E. coli
  R6K beta origin of replication
tgaagctttttttatgaatttatctgaagctgatgcagcttttctcaaggtatttgatgaaaccgtacctcccaaaaaagctaaggggtgatatatggctaaaatttacgatttccctcaaggagccgaacgccgcaggatgcaccgcaaaatccagtggaacaacgctgtaaaattatctaaaaatggctggagtaagccagaggttaaacgctggtcttttttagcattcatctcaactggctggtattactttcgcctttcggtagcagtcattttccatatcattactatttgtggtttagctgtgctcgcggcgttaagcaatacgatattctggattggtggcgcgatatgtcttgtaacctggtatacaaatgaccatcaaatttggagtactaacaatcttactatccctattgttttcggactttgggtgttaagtttagtagctgcaccactcatagattttttcagtcaaaaattgcccttttatcgtcttcttgtgcctgatgcgaagcgtgaggaagtgggcgaagatgattcttaaagccctgccctgtacggctttaacgccttctcgcggtagatctatggatgttgagaatgtagtatggttatactgcgatgcaggatagggcaaacgccgtaaaatgacgtctttgacgttatttttcagcgcttgcccggtgacctacagtcggtgcttgttgggagattttatgaagtttactagtaaaggattttatcagtgataaatatgcaaaggctattaacattttaaatgataaccttaaagaaaactactatgttttttatggtgtaaggttaagtgaaattctttttcctgcaagtgattatggtacagatgatttttttaaggagtttgaggaaataaacaacgttaccttgcctttagttgtttttgaaataaatgaacgtgaacctgtgattgtaattggttttgatgaaataaatcctgcgattcttatagagaaatccggtataaaggttttagtaatcggac

SEQ ID NO: 262 - DNA, 442 bp, E. coli
  R6K gamma origin of replication
gatcgctagtttgttttgactccatccattagggcttctaaaacgccttctaaggccatgtcagccgttaagtgttcctgtgtcactgaaaattgctttgagaggctctaagggcttctcagtgcgttacatccctggcttgttgtccacaaccgttaaaccttaaaagctttaaaagccttatatattcttttttttcttataaaacttaaaaccttagaggctatttaagttgctgatttatattaattttattgttcaaacatgagagcttagtacgtgaaacatgagagcttagtacgttagccatgagagcttagtacgttagccatgagggtttagttcgttaaacatgagagcttagtacgttaaacatgagagcttagtacgtgaaacatgagagcttagtacgtactatcaacaggttgaactgctgatcttc

SEQ ID NO: 263 - DNA, 242 bp, Enterobacteria phage P1
  P1 origin of plasmid replication oriR
tttcccgtcaacacacatcctatatcccgccagcacacattagcaacccgtcagcacacatttttatccctccagcacacatcgttttccctccagcacacatcgcgatacacttctaagccagacgtggcgcggcctgcaacgatcagggatctatatggatctaattgggatctgtatggacctgattattggatctatccagtggataatgtggataagtgaaaaaccggccaacgtag

SEQ ID NO: 264 - DNA, 792 bp, Artificial Sequence
  R1 origin of replication
ttatccacatttaactgcaagggacttccccataaggttacaaccgttcatgtcataaagcgccagccgccagtcttacagggtgcaatgtatcttttaaacacctgtttatatctcctttaaactacttaattacattcatttaaaaagaaaacctattcactgcctgtcctgtggacagacagatatgcacctcccaccgcaagcggcgggccccgaccggagccactttagttacaacacacaaaaacaacctccagaaaaaccccggtccagcgcagaaccgaaaccacaaagcccctccctcataactgaaaagcggccccgccccggcccaaagggccggaacagagtcgcttttaattatgaatgttgtaactacatcttcatcgctgtcagtcttctcgctggaagttctcagtacacgctcgtaagcggccctcacggcccgctaacgcggagatacgccccgacttcgggtaaaccctcgtcgggaccactccgaccgcgcacagaagctctctcatggctgaaagcgggtatggtctggcagggctggggatgggtaaggtgaaatctatcaatcagtaccggcttacgccgggcttcggcggttttactcctgtatcatatgaaacaacagagtgccgccttccatgccgctgatgcggcatatcctggtaacgatatctgaattgttatacatgtgtatatacgtggtaatgacaaaaataggacaagttaaaaatttacaggcgatgcaatgattcaaacacgtaatcaatatctgca

SEQ ID NO: 265 - DNA, 2920 bp, Artificial Sequence
  pWSK origin of replication
ccgatgcccttgagagccttcaacccagtcagctccttccggtgggcgcggggcatgactatcgtcgccgcacttatgactgtcttctttatcatgcaactcgtaggacagggtgccggcagcgctctgggtcattttcggcgaggaccgctttcgctggagcgcgacgatgatcggcctgtcgcttgcggtattcggaatcttgcacgccctcgctcaagccttcgtcactggtcccgccaccaaacgtttcggcgagaagcaggccattatcgccggcatggcggccgacgcgctgggctacgtcttgctggcgttcgcgacgcgaggctggatggccttccccattatgattcttctcgcttccggcggcatcgggatgcccgcgttgcaggccatgctgtccaggcaggtagatgacgaccatcagggacagcttcaaggatcgctcgcggctcttaccagcctaacttcgatcattggaccgctgatcgtcacggcgatttatgccgcctcggcgagcacatggaacgggttggcatggattgtaggcgccgccctataccttgtctgcctccccgcgttgcgtcgcggtgcatggagccgggccacctcgacctgaatggaagccggcggcacctcgctaacggattcaccactccgcagacccgccataaaacgccctgagaagcccgtgacgggcttttcttgtattatgggtagtttccttgcatgaatccataaaaggcgcctgtagtgccatttacccccattcactgccagagccgtgagcgcagcgaactgaatgtcacgaaaaagacagcgactcaggtgcctgatggtcggagacaaaaggaatattcagcgatttgcccgagcttgcgagggtgctacttaagcctttagggttttaaggtctgttttgtagaggagcaaacagcgtttgcgacatccttttgtaatactgcggaactgactaaagtagtgagttatacacagggctgggatctattctttttatctttttttattctttctttattctataaattataaccacttgaatataaacaaaaaaaacacacaaaggtctagcggaatttacagagggtctagcagaatttacaagttttccagcaaaggtctagcagaatttacagatacccacaactcaaaggaaaaggactagtaattatcattgactagcccatctcaattggtatagtgattaaaatcacctagaccaattgagatgtatgtctgaattagttgttttcaaagcaaatgaactagcgattagtcgctatgacttaacggagcatgaaaccaagctaattttatgctgtgtggcactactcaaccccacgattgaaaaccctacaaggaaagaacggacggtatcgttcacttataaccaatacgctcagatgatgaacatcagtagggaaaatgcttatggtgtattagctaaagcaaccagagagctgatgacgagaactgtggaaatcaggaatcctttggttaaaggctttgagattttccagtggacaaactatgccaagttctcaagcgaaaaattagaattagtttttagtgaagagatattgccttatcttttccagttaaaaaaattcataaaatataatctggaacatgttaagtcttttgaaaacaaatactctatgaggatttatgagtggttattaaaagaactaacacaaaagaaaactcacaaggcaaatatagagattagccttgatgaatttaagttcatgttaatgcttgaaaataactaccatgagtttaaaaggcttaaccaatgggttttgaaaccaataagtaaagatttaaacacttacagcaatatgaaattggtggttgataagcgaggccgcccgactgatacgttgattttccaagttgaactagatagacaaatggatctcgtaaccgaacttgagaacaaccagataaaaatgaatggtgacaaaataccaacaaccattacatcagattcctacctacataacggactaagaaaaacactacacgatgctttaactgcaaaaattcagctcaccagttttgaggcaaaatttttgagtgacatgcaaagtaagtatgatctcaatggttcgttctcatggctcacgcaaaaacaacgaaccacactagagaacatactggctaaatacggaaggatctgaggttcttatggctcttgtatctatcagtgaagcatcaagactaacaaacaaaagtagaacaactgttcaccgttacatatcaaagggaaaactgtccatatgcacagatgaaaacggtgtaaaaaagatagatacatcagagcttttacgagtttttggtgcattcaaagctgttcaccatgaacagatcgacaatgtaacagatgaacagcatgtaacacctaatagaacaggtgaaaccagtaaaacaaagcaactagaacatgaaattgaacacctgagacaacttgttacagctcaacagtcacacatagacagcctgaaacaggcgatgctgcttatcgaatcaaagctgccgacaacacgggagccagtgacgcctcccgtggggaaaaaatcatggcaattctggaagaaatagcgctttcagccggcaaaccggctgaagccggatctgcgattctgataacaaactagcaacaccagaacagcccgtttgcgggcagcaaaacccgtacttttggacgttccggcggttttttgtggcgagtggtgttcgggcggtgcgcgcaagatccattatgttaaacgggcgagtttacatctcaaaaccgcccgcttaacaccatcagaaatcctcagcgcgattttaagcaccaacccccccccgtaacacccaaatccatactgaaagtggctttgttgaataaatc

SEQ ID NO: 266 - DNA, 37 bp, E. coli
  ColE2 origin of replication
aaaatgagaccagataagccttatcagataacagcgc

SEQ ID NO: 267 - DNA, 668 bp, Artificial Sequence
  pUC origin of replication
tgagcaaaaggccagcaaaaggccaggaaccgtaaaaaggccgcgttgctggcgtttttccataggctccgcccccctgacgagcatcacaaaaatcgacgctcaagtcagaggtggcgaaacccgacaggactataaagataccaggcgtttccccctggaagctccctcgtgcgctctcctgttccgaccctgccgcttaccggatacctgtccgcctttctcccttcgggaagcgtggcgctttctcatagctcacgctgtaggtatctcagttcggtgtaggtcgttcgctccaagctgggctgtgtgcacgaaccccccgttcagcccgaccgctgcgccttatccggtaactatcgtcttgagtccaacccggtaagacacgacttatcgccactggcagcagccactggtaacaggattagcagagcgaggtatgtaggcggtgctacagagttcttgaagtggtggcctaactacggctacactagaagaacagtatttggtatctgcgctctgctgaagccagttaccttcggaaaaagagttggtagctcttgatccggcaaacaaaccaccgctggtagcggtggtttttttgtttgcaagcagcagattacgcgcagaaaaaaaggatctcaagaagatcctttgatcttttctac

SEQ ID NO: 268 - DNA, 457 bp, Bacteriophage F1
  F1 origin of replication
gacgcgccctgtagcggcgcattaagcgcggcgggtgtggtggttacgcgcagcgtgaccgctacacttgccagcgccctagcgcccgctcctttcgctttcttcccttcctttctcgccacgttcgccggctttccccgtcaagctctaaatcgggggctccctttagggttccgatttagtgctttacggcacctcgaccccaaaaaacttgattagggtgatggttcacgtagtgggccatcgccctgatagacggtttttcgccctttgacgttggagtccacgttctttaatagtggactcttgttccaaactggaacaacactcaaccctatctcggtctattcttttgatttataagggattttgccgatttcggcctattggttaaaaaatgagctgatttaacaaaaatttaacgcgaattttaacaaaatattaacgcttacaattt

SEQ ID NO: 269 - DNA, 534 bp, Homo sapiens
  IL-7
atgttccatgtttcttttaggtatatctttggacttcctcccctgatccttgttctgttgccagtagcatcatctgattgtgatattgaaggtaaagatggcaaacaatatgagagtgttctaatggtcagcatcgatcaattattggacagcatgaaagaaattggtagcaattgcctgaataatgaatttaacttttttaaaagacatatctgtgatgctaataaggaaggtatgtttttattccgtgctgctcgcaagttgaggcaatttcttaaaatgaatagcactggtgattttgatctccacttattaaaagtttcagaaggcacaacaatactgttgaactgcactggccaggttaaaggaagaaaaccagctgccctgggtgaagcccaaccaacaaagagtttggaagaaaataaatctttaaaggaacagaaaaaactgaatgacttgtgtttcctaaagagactattacaagagataaaaacttgttggaataaaattttgatgggcactaaagaacactga

SEQ ID NO: 270 - DNA, 987 bp, Homo sapiens
  IL12B
atgtgtcaccagcagttggtcatctcttggttttccctggtttttctggcatctcccctcgtggccatatgggaactgaagaaagatgtttatgtcgtagaattggattggtatccggatgcccctggagaaatggtggtcctcacctgtgacacccctgaagaagatggtatcacctggaccttggaccagagcagtgaggtcttaggctctggcaaaaccctgaccatccaagtcaaagagtttggagatgctggccagtacacctgtcacaaaggaggcgaggttctaagccattcgctcctgctgcttcacaaaaaggaagatggaatttggtccactgatattttaaaggaccagaaagaacccaaaaataagacctttctaagatgcgaggccaagaattattctggacgtttcacctgctggtggctgacgacaatcagtactgatttgacattcagtgtcaaaagcagcagaggctcttctgacccccaaggggtgacgtgcggagctgctacactctctgcagagagagtcagaggggacaacaaggagtatgagtactcagtggagtgccaggaggacagtgcctgcccagctgctgaggagagtctgcccattgaggtcatggtggatgccgttcacaagctcaagtatgaaaactacaccagcagcttcttcatcagggacatcatcaaacctgacccacccaagaacttgcagctgaagccattaaagaattctcggcaggtggaggtcagctgggagtaccctgacacctggagtactccacattcctacttctccctgacattctgcgttcaggtccagggcaagagcaagagagaaaagaaagatagagtcttcacggacaagacctcagccacggtcatctgccgcaaaaatgccagcattagcgtgcgggcccaggaccgctactatagctcatcttggagcgaatgggcatctgtgccctgcagttag

SEQ ID NO: 271 - DNA, 762 bp, Homo sapiens
  IL12A
atgtggccccctgggtcagcctcccagccaccgccctcacctgccgcggccacaggtctgcatccagcggctcgccctgtgtccctgcagtgccggctcagcatgtgtccagcgcgcagcctcctccttgtggctaccctggtcctcctggaccacctcagtttggccagaaacctccccgtggccactccagacccaggaatgttcccatgccttcaccactcccaaaacctgctgagggccgtcagcaacatgctccagaaggccagacaaactctagaattttacccttgcacttctgaagagattgatcatgaagatatcacaaaagataaaaccagcacagtggaggcctgtttaccattggaattaaccaagaatgagagttgcctaaattccagagagacctctttcataactaatgggagttgcctggcctccagaaagacctcttttatgatggccctgtgccttagtagtatttatgaagacttgaagatgtaccaggtggagttcaagaccatgaatgcaaagcttctgatggatcctaagaggcagatctttctagatcaaaacatgctggcagttattgatgagctgatgcaggccctgaatttcaacagtgagactgtgccacaaaaatcctcccttgaagaaccggatttttataaaactaaaatcaagctctgcatacttcttcatgctttcagaattcgggcagtgactattgatagagtgatgagctatctgaatgcttcctaa

SEQ ID NO: 272 - DNA, 489 bp, Homo sapiens
  IL-15
atgagaatttcgaaaccacatttgagaagtatttccatccagtgctacttgtgtttacttctaaacagtcattttctaactgaagctggcattcatgtcttcattttgggctgtttcagtgcagggcttcctaaaacagaagccaactgggtgaatgtaataagtgatttgaaaaaaattgaagatcttattcaatctatgcatattgatgctactttatatacggaaagtgatgttcaccccagttgcaaagtaacagcaatgaagtgctttctcttggagttacaagttatttcacttgagtccggagatgcaagtattcatgatacagtagaaaatctgatcatcctagcaaacaacagtttgtcttctaatgggaatgtaacagaatctggatgcaaagaatgtgaggaactggaggaaaaaaatattaaagaatttttgcagagttttgtacatattgtccaaatgttcatcaacacttcttga

SEQ ID NO: 273 - DNA, 804 bp, Homo sapiens
  IL15RA
atggccccgcggcgggcgcgcggctgccggaccctcggtctcccggcgctgctactgctgctgctgctccggccgccggcgacgcggggcatcacgtgccctccccccatgtccgtggaacacgcagacatctgggtcaagagctacagcttgtactccagggagcggtacatttgtaactctggtttcaagcgtaaagccggcacgtccagcctgacggagtgcgtgttgaacaaggccacgaatgtcgcccactggacaacccccagtctcaaatgcattagagaccctgccctggttcaccaaaggccagcgccaccctccacagtaacgacggcaggggtgaccccacagccagagagcctctccccttctggaaaagagcccgcagcttcatctcccagctcaaacaacacagcggccacaacagcagctattgtcccgggctcccagctgatgccttcaaaatcaccttccacaggaaccacagagataagcagtcatgagtcctcccacggcaccccctctcagacaacagccaagaactgggaactcacagcatccgcctcccaccagccgccaggtgtgtatccacagggccacagcgacaccactgtggctatctccacgtccactgtcctgctgtgtgggctgagcgctgtgtctctcctggcatgctacctcaagtcaaggcaaactcccccgctggccagcgttgaaatggaagccatggaggctctgccggtgacttgggggaccagcagcagagatgaagacttggaaaactgctctcaccacctatga

SEQ ID NO: 274 - DNA, 378 bp, Homo sapiens
  CXCL9
atgaagaaaagtggtgttcttttcctcttgggcatcatcttgctggttctgattggagtgcaaggaaccccagtagtgagaaagggtcgctgttcctgcatcagcaccaaccaagggactatccacctacaatccttgaaagaccttaaacaatttgccccaagcccttcctgcgagaaaattgaaatcattgctacactgaagaatggagttcaaacatgtctaaacccagattcagcagatgtgaaggaactgattaaaaagtgggagaaacaggtcagccaaaagaaaaagcaaaagaatgggaaaaaacatcaaaaaaagaaagttctgaaagttcgaaaatctcaacgttctcgtcaaaagaagactacataa

SEQ ID NO: 275 - DNA, 297 bp, Homo sapiens
  CXCL10
atgaatcaaactgccattctgatttgctgccttatctttctgactctaagtggcattcaaggagtacctctctctagaactgtacgctgtacctgcatcagcattagtaatcaacctgttaatccaaggtctttagaaaaacttgaaattattcctgcaagccaattttgtccacgtgttgagatcattgctacaatgaaaaagaagggtgagaagagatgtctgaatccagaatcgaaggccatcaagaatttactgaaagcagttagcaaggaaaggtctaaaagatctccttaa

SEQ ID NO: 276 - DNA, 285 bp, Homo sapiens
  CXCL11
atgagtgtgaagggcatggctatagccttggctgtgatattgtgtgctacagttgttcaaggcttccccatgttcaaaagaggacgctgtctttgcataggccctggggtaaaagcagtgaaagtggcagatattgagaaagcctccataatgtacccaagtaacaactgtgacaaaatagaagtgattattaccctgaaagaaaataaaggacaacgatgcctaaatcccaaatcgaagcaagcaaggcttataatcaaaaaagttgaaagaaagaatttttaa

SEQ ID NO: 277 - DNA, 465 bp, Homo sapiens
  CCL5
atgaaggtctccgcggcagccctcgctgtcatcctcattgctactgccctctgcgctcctgcatctgcctccccatattcctcggacaccacaccctgctgctttgcctacattgcccgcccactgccccgtgcccacatcaaggagtatttctacaccagtggcaagtgctccaacccagcagtcgtccacaggtcaaggatgccaaagagagagggacagcaagtctggcaggatttcctgtatgactcccggctgaacaagggcaagctttgtcacccgaaagaaccgccaagtgtgtgccaacccagagaagaaatgggttcgggagtacatcaactctttggagatgagctaggatggagagtccttgaacctgaacttacacaaatttgcctgtttctgcttgctcttgtcctagcttgggaggcttcccctcactatcctaccccacccgctccttga

SEQ ID NO: 278 - DNA, 765 bp, Homo sapiens
  4-1BB Ligand
atggaatacgcctctgacgcttcactggaccccgaagccccgtggcctcccgcgccccgcgctcgcgcctgccgcgtactgccttgggccctggtcgcggggctgctgctgctgctgctgctcgctgccgcctgcgccgtcttcctcgcctgcccctgggccgtgtccggggctcgcgcctcgcccggctccgcggccagcccgagactccgcgagggtcccgagctttcgcccgacgatcccgccggcctcttggacctgcggcagggcatgtttgcgcagctggtggcccaaaatgttctgctgatcgatgggcccctgagctggtacagtgacccaggcctggcaggcgtgtccctgacggggggcctgagctacaaagaggacacgaaggagctggtggtggccaaggctggagtctactatgtcttctttcaactagagctgcggcgcgtggtggccggcgagggctcaggctccgtttcacttgcgctgcacctgcagccactgcgctctgctgctggggccgccgccctggctttgaccgtggacctgccacccgcctcctccgaggctcggaactcggccttcggtttccagggccgcttgctgcacctgagtgccggccagcgcctgggcgtccatcttcacactgaggccagggcacgccatgcctggcagcttacccagggcgccacagtcttgggactcttccgggtgacccccgaaatcccagccggactcccttcaccgaggtcggaataa

SEQ ID NO: 279 - DNA, 1368 bp, Homo sapiens
  TNFRSF1A
atgggcctctccaccgtgcctgacctgctgctgccactggtgctcctggagctgttggtgggaatatacccctcaggggttattggactggtccctcacctaggggacagggagaagagagatagtgtgtgtccccaaggaaaatatatccaccctcaaaataattcgatttgctgtaccaagtgccacaaaggaacctacttgtacaatgactgtccaggcccggggcaggatacggactgcagggagtgtgagagcggctccttcaccgcttcagaaaaccacctcagacactgcctcagctgctccaaatgccgaaaggaaatgggtcaggtggagatctcttcttgcacagtggaccgggacaccgtgtgtggctgcaggaagaaccagtaccggcattattggagtgaaaaccttttccagtgcttcaattgcagcctctgcctcaatgggaccgtgcacctctcctgccaggagaaacagaacaccgtgtgcacctgccatgcaggtttctttctaagagaaaacgagtgtgtctcctgtagtaactgtaagaaaagcctggagtgcacgaagttgtgcctaccccagattgagaatgttaagggcactgaggactcaggcaccacagtgctgttgcccctggtcattttctttggtctttgccttttatccctcctcttcattggtttaatgtatcgctaccaacggtggaagtccaagctctactccattgtttgtgggaaatcgacacctgaaaaagagggggagcttgaaggaactactactaagcccctggccccaaacccaagcttcagtcccactccaggcttcacccccaccctgggcttcagtcccgtgcccagttccaccttcacctccagctccacctatacccccggtgactgtcccaactttgcggctccccgcagagaggtggcaccaccctatcagggggctgaccccatccttgcgacagccctcgcctccgaccccatccccaacccccttcagaagtgggaggacagcgcccacaagccacagagcctagacactgatgaccccgcgacgctgtacgccgtggtggagaacgtgcccccgttgcgctggaaggaattcgtgcggcgcctagggctgagcgaccacgagatcgatcggctggagctgcagaacgggcgctgcctgcgcgaggcgcaatacagcatgctggcgacctggaggcggcgcacgccgcggcgcgaggccacgctggagctgctgggacgcgtgctccgcgacatggacctgctgggctgcctggaggacatcgaggaggcgctttgcggccccgccgccctcccgcccgcgcccagtcttctcagatga

SEQ ID NO: 280 - DNA, 1386 bp, Homo sapiens
  TNFRSF1B
atggcgcccgtcgccgtctgggccgcgctggccgtcggactggagctctgggctgcggcgcacgccttgcccgcccaggtggcatttacaccctacgccccggagcccgggagcacatgccggctcagagaatactatgaccagacagctcagatgtgctgcagcaaatgctcgccgggccaacatgcaaaagtcttctgtaccaagacctcggacaccgtgtgtgactcctgtgaggacagcacatacacccagctctggaactgggttcccgagtgcttgagctgtggctcccgctgtagctctgaccaggtggaaactcaagcctgcactcgggaacagaaccgcatctgcacctgcaggcccggctggtactgcgcgctgagcaagcaggaggggtgccggctgtgcgcgccgctgcgcaagtgccgcccgggcttcggcgtggccagaccaggaactgaaacatcagacgtggtgtgcaagccctgtgccccggggacgttctccaacacgacttcatccacggatatttgcaggccccaccagatctgtaacgtggtggccatccctgggaatgcaagcatggatgcagtctgcacgtccacgtcccccacccggagtatggccccaggggcagtacacttaccccagccagtgtccacacgatcccaacacacgcagccaactccagaacccagcactgctccaagcacctccttcctgctcccaatgggccccagccccccagctgaagggagcactggcgacttcgctcttccagttggactgattgtgggtgtgacagccttgggtctactaataataggagtggtgaactgtgtcatcatgacccaggtgaaaaagaagcccttgtgcctgcagagagaagccaaggtgcctcacttgcctgccgataaggcccggggtacacagggccccgagcagcagcacctgctgatcacagcgccgagctccagcagcagctccctggagagctcggccagtgcgttggacagaagggcgcccactcggaaccagccacaggcaccaggcgtggaggccagtggggccggggaggcccgggccagcaccgggagctcagattcttcccctggtggccatgggacccaggtcaatgtcacctgcatcgtgaacgtctgtagcagctctgaccacagctcacagtgctcctcccaagccagctccacaatgggagacacagattccagcccctcggagtccccgaaggacgagcaggtccccttctccaaggaggaatgtgcctttcggtcacagctggagacgccagagaccctgctggggagcaccgaagagaagcccctgccccttggagtgcctgatgctgggatgaagcccagttaa

SEQ ID NO: 281 - DNA, 1308 bp, Homo sapiens
  LTBR
atgctcctgccttgggccacctctgcccccggcctggcctgggggcctctggtgctgggcctcttcgggctcctggcagcatcgcagccccaggcggtgcctccatatgcgtcggagaaccagacctgcagggaccaggaaaaggaatactatgagccccagcaccgcatctgctgctcccgctgcccgccaggcacctatgtctcagctaaatgtagccgcatccgggacacagtttgtgccacatgtgccgagaattcctacaacgagcactggaactacctgaccatctgccagctgtgccgcccctgtgacccagtgatgggcctcgaggagattgccccctgcacaagcaaacggaagacccagtgccgctgccagccgggaatgttctgtgctgcctgggccctcgagtgtacacactgcgagctactttctgactgcccgcctggcactgaagccgagctcaaagatgaagttgggaagggtaacaaccactgcgtcccctgcaaggccgggcacttccagaatacctcctcccccagcgcccgctgccagccccacaccaggtgtgagaaccaaggtctggtggaggcagctccaggcactgcccagtccgacacaacctgcaaaaatccattagagccactgcccccagagatgtcaggaaccatgctgatgctggccgttctgctgccactggccttctttctgctccttgccaccgtcttctcctgcatctggaagagccacccttctctctgcaggaaactgggatcgctgctcaagaggcgtccgcagggagagggacccaatcctgtagctggaagctgggagcctccgaaggcccatccatacttccctgacttggtacagccactgctacccatttctggagatgtttccccagtatccactgggctccccgcagccccagttttggaggcaggggtgccgcaacagcagagtcctctggacctgaccagggagccgcagttggaacccggggagcagagccaggtggcccacggtaccaatggcattcatgtcaccggcgggtctatgactatcactggcaacatctacatctacaatggaccagtactggggggaccaccgggtcctggagacctcccagctacccccgaacctccataccccattcccgaagagggggaccctggccctcccgggctctctacaccccaccaggaagatggcaaggcttggcacctagcggagacagagcactgtggtgccacaccctctaacaggggcccaaggaaccaatttatcacccatgactga

SEQ ID NO: 282 - DNA, 1008 bp, Homo sapiens
  FAS
atgctgggcatctggaccctcctacctctggttcttacgtctgttgctagattatcgtccaaaagtgttaatgcccaagtgactgacatcaactccaagggattggaattgaggaagactgttactacagttgagactcagaacttggaaggcctgcatcatgatggccaattctgccataagccctgtcctccaggtgaaaggaaagctagggactgcacagtcaatggggatgaaccagactgcgtgccctgccaagaagggaaggagtacacagacaaagcccatttttcttccaaatgcagaagatgtagattgtgtgatgaaggacatggcttagaagtggaaataaactgcacccggacccagaataccaagtgcagatgtaaaccaaactttttttgtaactctactgtatgtgaacactgtgacccttgcaccaaatgtgaacatggaatcatcaaggaatgcacactcaccagcaacaccaagtgcaaagaggaaggatccagatctaacttggggtggctttgtcttcttcttttgccaattccactaattgtttgggtgaagagaaaggaagtacagaaaacatgcagaaagcacagaaaggaaaaccaaggttctcatgaatctccaactttaaatcctgaaacagtggcaataaatttatctgatgttgacttgagtaaatatatcaccactattgctggagtcatgacactaagtcaagttaaaggctttgttcgaaagaatggtgtcaatgaagccaaaatagatgagatcaagaatgacaatgtccaagacacagcagaacagaaagttcaactgcttcgtaattggcatcaacttcatggaaagaaagaagcgtatgacacattgattaaagatctcaaaaaagccaatctttgtactcttgcagagaaaattcagactatcatcctcaaggacattactagtgactcagaaaattcaaacttcagaaatgaaatccaaagcttggtctag

SEQ ID NO: 283 - DNA, 903 bp, Homo sapiens
  TNFRSF6B
atgagggcgctggaggggccaggcctgtcgctgctgtgcctggtgttggcgctgcctgccctgctgccggtgccggctgtacgcggagtggcagaaacacccacctacccctggcgggacgcagagacaggggagcggctggtgtgcgcccagtgccccccaggcacctttgtgcagcggccgtgccgccgagacagccccacgacgtgtggcccgtgtccaccgcgccactacacgcagttctggaactacctagagcgctgccgctactgcaacgtcctctgcggggagcgtgaggaggaggcacgggcttgccacgccacccacaaccgtgcctgccgctgccgcaccggcttcttcgcgcacgctggtttctgcttggagcacgcatcgtgtccacctggtgccggcgtgattgccccgggcacccccagccagaacacgcagtgccagccgtgccccccaggcaccttctcagccagcagctccagctcagagcagtgccagccccaccgcaactgcacggccctgggcctggccctcaatgtgccaggctcttcctcccatgacaccctgtgcaccagctgcactggcttccccctcagcaccagggtaccaggagctgaggagtgtgagcgtgccgtcatcgactttgtggctttccaggacatctccatcaagaggctgcagcggctgctgcaggccctcgaggccccggagggctggggtccgacaccaagggcgggccgcgcggccttgcagctgaagctgcgtcggcggctcacggagctcctgggggcgcaggacggggcgctgctggtgcggctgctgcaggcgctgcgcgtggccaggatgcccgggctggagcggagcgtccgtgagcgcttcctccctgtgcactga

SEQ ID NO: 284 - DNA, 783 bp, Homo sapiens
  CD27
atggcacggccacatccctggtggctgtgcgttctggggaccctggtggggctctcagctactccagcccccaagagctgcccagagaggcactactgggctcagggaaagctgtgctgccagatgtgtgagccaggaacattcctcgtgaaggactgtgaccagcatagaaaggctgctcagtgtgatccttgcataccgggggtctccttctctcctgaccaccacacccggccccactgtgagagctgtcggcactgtaactctggtcttctcgttcgcaactgcaccatcactgccaatgctgagtgtgcctgtcgcaatggctggcagtgcagggacaaggagtgcaccgagtgtgatcctcttccaaacccttcgctgaccgctcggtcgtctcaggccctgagcccacaccctcagcccacccacttaccttatgtcagtgagatgctggaggccaggacagctgggcacatgcagactctggctgacttcaggcagctgcctgcccggactctctctacccactggccaccccaaagatccctgtgcagctccgattttattcgcatccttgtgatcttctctggaatgttccttgttttcaccctggccggggccctgttcctccatcaacgaaggaaatatagatcaaacaaaggagaaagtcctgtggagcctgcagagccttgtcgttacagctgccccagggaggaggagggcagcaccatccccatccaggaggattaccgaaaaccggagcctgcctgctccccctga

SEQ ID NO: 285 - DNA, 1788 bp, Homo sapiens
  TNFRSF8
atgcgcgtcctcctcgccgcgctgggactgctgttcctgggggcgctacgagccttcccacaggatcgacccttcgaggacacctgtcatggaaaccccagccactactatgacaaggctgtcaggaggtgctgttaccgctgccccatggggctgttcccgacacagcagtgcccacagaggcctactgactgcaggaagcagtgtgagcctgactactacctggatgaggccgaccgctgtacagcctgcgtgacttgttctcgagacgacctcgtggagaagacgccgtgtgcatggaactcctcccgtgtctgcgaatgtcgacccggcatgttctgttccacgtctgccgtcaactcctgtgcccgctgcttcttccattctgtctgtccggcagggatgattgtcaagttcccaggcacggcgcagaagaacacggtctgtgagccggcttccccaggggtcagccctgcctgtgccagcccagagaactgcaaggaaccctccagtggcaccatcccccaggccaagcccaccccggtgtccccagcaacctccagtgccagcaccatgcctgtaagagggggcacccgcctcgcccaggaagctgcttctaaactgacgagggctcccgactctccctcctctgtgggaaggcctagttcagatccaggtctgtccccaacacagccatgcccagaggggtctggtgattgcagaaagcagtgtgagcccgactactacctggacgaggccggccgctgcacggcctgcgtgagctgttctcgagatgaccttgtggagaagacgccatgtgcatggaactcctcccgcacctgcgaatgtcgacctggcatgatctgtgccacatcagccaccaactcctgtgcccgctgtgtcccctacccaatctgtgcagcagagacggtcaccaagccccaggatatggctgagaaggacaccacctttgaggcgccacccctggggacccagccggactgcaaccccaccccagagaatggcgaggcgcctgccagcaccagccccactcagagcttgctggtggactcccaggccagtaagacgctgcccatcccaaccagcgctcccgtcgctctctcctccacggggaagcccgttctggatgcagggccagtgctcttctgggtgatcctggtgttggttgtggtggtcggctccagcgccttcctcctgtgccaccggagggcctgcaggaagcgaattcggcagaagctccacctgtgctacccggtccagacctcccagcccaagctagagcttgtggattccagacccaggaggagctcaacgcagctgaggagtggtgcgtcggtgacagaacccgtcgcggaagagcgagggttaatgagccagccactgatggagacctgccacagcgtgggggcagcctacctggagagcctgccgctgcaggatgccagcccggccgggggcccctcgtcccccagggaccttcctgagccccgggtgtccacggagcacaccaataacaagattgagaaaatctacatcatgaaggctgacaccgtgatcgtggggaccgtgaaggctgagctgccggagggccggggcctggcggggccagcagagcccgagttggaggaggagctggaggcggaccataccccccactaccccgagcaggagacagaaccgcctctgggcagctgcagcgatgtcatgctctcagtggaagaggaagggaaagaagaccccttgcccacagctgcctctggaaagtga

SEQ ID NO: 286 - DNA, 1407 bp, Homo sapiens
  TNFRSF10A
atggcgccaccaccagctagagtacatctaggtgcgttcctggcagtgactccgaatcccgggagcgcagcgagtgggacagaggcagccgcggccacacccagcaaagtgtggggctcttccgcggggaggattgaaccacgaggcgggggccgaggagcgctccctacctccatgggacagcacggacccagtgcccgggcccgggcagggcgcgccccaggacccaggccggcgcgggaagccagccctcggctccgggtccacaagaccttcaagtttgtcgtcgtcggggtcctgctgcaggtcgtacctagctcagctgcaaccatcaaacttcatgatcaatcaattggcacacagcaatgggaacatagccctttgggagagttgtgtccaccaggatctcatagatcagaacatcctggagcctgtaaccggtgcacagagggtgtgggttacaccaatgcttccaacaatttgtttgcttgcctcccatgtacagcttgtaaatcagatgaagaagagagaagtccctgcaccacgaccaggaacacagcatgtcagtgcaaaccaggaactttccggaatgacaattctgctgagatgtgccggaagtgcagcagagggtgccccagagggatggtcaaggtcaaggattgtacgccctggagtgacatcgagtgtgtccacaaagaatcaggcaatggacataatatatgggtgattttggttgtgactttggttgttccgttgctgttggtggctgtgctgattgtctgttgttgcatcggctcaggttgtggaggggaccccaagtgcatggacagggtgtgtttctggcgcttgggtctcctacgagggcctggggctgaggacaatgctcacaacgagattctgagcaacgcagactcgctgtccactttcgtctctgagcagcaaatggaaagccaggagccggcagatttgacaggtgtcactgtacagtccccaggggaggcacagtgtctgctgggaccggcagaagctgaagggtctcagaggaggaggctgctggttccagcaaatggtgctgaccccactgagactctgatgctgttctttgacaagtttgcaaacatcgtgccctttgactcctgggaccagctcatgaggcagctggacctcacgaaaaatgagatcgatgtggtcagagctggtacagcaggcccaggggatgccttgtatgcaatgctgatgaaatgggtcaacaaaactggacggaacgcctcgatccacaccctgctggatgccttggagaggatggaagagagacatgcaagagagaagattcaggacctcttggtggactctggaaagttcatctacttagaagatggcacaggctctgccgtgtccttggagtga

SEQ ID NO: 287 - DNA, 1323 bp, Homo sapiens
  TNFRSF10B
atggaacaacggggacagaacgccccggccgcttcgggggcccggaaaaggcacggcccaggacccagggaggcgcggggagccaggcctgggccccgggtccccaagacccttgtgctcgttgtcgccgcggtcctgctgttggtctcagctgagtctgctctgatcacccaacaagacctagctccccagcagagagcggccccacaacaaaagaggtccagcccctcagagggattgtgtccacctggacaccatatctcagaagacggtagagattgcatctcctgcaaatatggacaggactatagcactcactggaatgacctccttttctgcttgcgctgcaccaggtgtgattcaggtgaagtggagctaagtccctgcaccacgaccagaaacacagtgtgtcagtgcgaagaaggcaccttccgggaagaagattctcctgagatgtgccggaagtgccgcacagggtgtcccagagggatggtcaaggtcggtgattgtacaccctggagtgacatcgaatgtgtccacaaagaatcaggtacaaagcacagtggggaagtcccagctgtggaggagacggtgacctccagcccagggactcctgcctctccctgttctctctcaggcatcatcataggagtcacagttgcagccgtagtcttgattgtggctgtgtttgtttgcaagtctttactgtggaagaaagtccttccttacctgaaaggcatctgctcaggtggtggtggggaccctgagcgtgtggacagaagctcacaacgacctggggctgaggacaatgtcctcaatgagatcgtgagtatcttgcagcccacccaggtccctgagcaggaaatggaagtccaggagccagcagagccaacaggtgtcaacatgttgtcccccggggagtcagagcatctgctggaaccggcagaagctgaaaggtctcagaggaggaggctgctggttccagcaaatgaaggtgatcccactgagactctgagacagtgcttcgatgactttgcagacttggtgccctttgactcctgggagccgctcatgaggaagttgggcctcatggacaatgagataaaggtggctaaagctgaggcagcgggccacagggacaccttgtacacgatgctgataaagtgggtcaacaaaaccgggcgagatgcctctgtccacaccctgctggatgccttggagacgctgggagagagacttgccaagcagaagattgaggaccacttgttgagctctggaaagttcatgtatctagaaggtaatgcagactctgccatgtcctaa

SEQ ID NO: 288 - DNA, 780 bp, Homo sapiens
  TNFRSF10C
atggcccggatccccaagaccctaaagttcgtcgtcgtcatcgtcgcggtcctgctgccagtcctagcttactctgccaccactgcccggcaggaggaagttccccagcagacagtggccccacagcaacagaggcacagcttcaagggggaggagtgtccagcaggatctcatagatcagaacatactggagcctgtaacccgtgcacagagggtgtggattacaccaacgcttccaacaatgaaccttcttgcttcccatgtacagtttgtaaatcagatcaaaaacataaaagttcctgcaccatgaccagagacacagtgtgtcagtgtaaagaaggcaccttccggaatgaaaactccccagagatgtgccggaagtgtagcaggtgccctagtggggaagtccaagtcagtaattgtacgtcctgggatgatatccagtgtgttgaagaatttggtgccaatgccactgtggaaaccccagctgctgaagagacaatgaacaccagcccggggactcctgccccagctgctgaagagacaatgaacaccagcccagggactcctgccccagctgctgaagagacaatgaccaccagcccggggactcctgccccagctgctgaagagacaatgaccaccagcccggggactcctgccccagctgctgaagagacaatgaccaccagcccggggactcctgcctcttctcattacctctcatgcaccatcgtagggatcatagttctaattgtgcttctgattgtgtttgtttga

SEQ ID NO: 289 - DNA, 1161 bp, Homo sapiens
  TNFRSF10D
atgggactttggggacaaagcgtcccgaccgcctcgagcgctcgagcagggcgctatccaggagccaggacagcgtcgggaaccagaccatggctcctggaccccaagatccttaagttcgtcgtcttcatcgtcgcggttctgctgccggtccgggttgactctgccaccatcccccggcaggacgaagttccccagcagacagtggccccacagcaacagaggcgcagcctcaaggaggaggagtgtccagcaggatctcatagatcagaatatactggagcctgtaacccgtgcacagagggtgtggattacaccattgcttccaacaatttgccttcttgcctgctatgtacagtttgtaaatcaggtcaaacaaataaaagttcctgtaccacgaccagagacaccgtgtgtcagtgtgaaaaaggaagcttccaggataaaaactcccctgagatgtgccggacgtgtagaacagggtgtcccagagggatggtcaaggtcagtaattgtacgccccggagtgacatcaagtgcaaaaatgaatcagctgccagttccactgggaaaaccccagcagcggaggagacagtgaccaccatcctggggatgcttgcctctccctatcactaccttatcatcatagtggttttagtcatcattttagctgtggttgtggttggcttttcatgtcggaagaaattcatttcttacctcaaaggcatctgctcaggtggtggaggaggtcccgaacgtgtgcacagagtccttttccggcggcgttcatgtccttcacgagttcctggggcggaggacaatgcccgcaacgagaccctgagtaacagatacttgcagcccacccaggtctctgagcaggaaatccaaggtcaggagctggcagagctaacaggtgtgactgtagagttgccagaggagccacagcgtctgctggaacaggcagaagctgaagggtgtcagaggaggaggctgctggttccagtgaatgacgctgactccgctgacatcagcaccttgctggatgcctcggcaacactggaagaaggacatgcaaaggaaacaattcaggaccaactggtgggctccgaaaagctcttttatgaagaagatgaggcaggctctgctacgtcctgcctgtga

SEQ ID NO: 290 - DNA, 1851 bp, Homo sapiens
  TNFRSF11A
atggccccgcgcgcccggcggcgccgcccgctgttcgcgctgctgctgctctgcgcgctgctcgcccggctgcaggtggctttgcagatcgctcctccatgtaccagtgagaagcattatgagcatctgggacggtgctgtaacaaatgtgaaccaggaaagtacatgtcttctaaatgcactactacctctgacagtgtatgtctgccctgtggcccggatgaatacttggatagctggaatgaagaagataaatgcttgctgcataaagtttgtgatacaggcaaggccctggtggccgtggtcgccggcaacagcacgaccccccggcgctgcgcgtgcacggctgggtaccactggagccaggactgcgagtgctgccgccgcaacaccgagtgcgcgccgggcctgggcgcccagcacccgttgcagctcaacaaggacacagtgtgcaaaccttgccttgcaggctacttctctgatgccttttcctccacggacaaatgcagaccctggaccaactgtaccttccttggaaagagagtagaacatcatgggacagagaaatccgatgcggtttgcagttcttctctgccagctagaaaaccaccaaatgaaccccatgtttacttgcccggtttaataattctgcttctcttcgcgtctgtggccctggtggctgccatcatctttggcgtttgctataggaaaaaagggaaagcactcacagctaatttgtggcactggatcaatgaggcttgtggccgcctaagtggagataaggagtcctcaggtgacagttgtgtcagtacacacacggcaaactttggtcagcagggagcatgtgaaggtgtcttactgctgactctggaggagaagacatttccagaagatatgtgctacccagatcaaggtggtgtctgtcagggcacatgtgtaggaggtggtccctacgcacaaggcgaagatgccaggatgctctcattggtcagcaagaccgagatagaggaagacagcttcagacagatgcccacagaagatgaatacatggacaggccctcccagcccacagaccagttactgttcctcactgagcctggaagcaaatccacacctcctttctctgaacccctggaggtgggggagaatgacagtttaagccagtgcttcacggggacacagagcacagtgggttcagaaagctgcaactgcactgagcccctgtgcaggactgattggactcccatgtcctctgaaaactacttgcaaaaagaggtggacagtggccattgcccgcactgggcagccagccccagccccaactgggcagatgtctgcacaggctgccggaaccctcctggggaggactgtgaacccctcgtgggttccccaaaacgtggacccttgccccagtgcgcctatggcatgggccttccccctgaagaagaagccagcaggacggaggccagagaccagcccgaggatggggctgatgggaggctcccaagctcagcgagggcaggtgccgggtctggaagctcccctggtggccagtcccctgcatctggaaatgtgactggaaacagtaactccacgttcatctccagcgggcaggtgatgaacttcaagggcgacatcatcgtggtctacgtcagccagacctcgcaggagggcgcggcggcggctgcggagcccatgggccgcccggtgcaggaggagaccctggcgcgccgagactccttcgcggggaacggcccgcgcttcccggacccgtgcggcggccccgaggggctgcgggagccggagaaggcctcgaggccggtgcaggagcaaggcggggccaaggcttga

SEQ ID NO: 291 - DNA, 1206 bp, Homo sapiens
  TNFRSF11B
atgaacaacttgctgtgctgcgcgctcgtgtttctggacatctccattaagtggaccacccaggaaacgtttcctccaaagtaccttcattatgacgaagaaacctctcatcagctgttgtgtgacaaatgtcctcctggtacctacctaaaacaacactgtacagcaaagtggaagaccgtgtgcgccccttgccctgaccactactacacagacagctggcacaccagtgacgagtgtctatactgcagccccgtgtgcaaggagctgcagtacgtcaagcaggagtgcaatcgcacccacaaccgcgtgtgcgaatgcaaggaagggcgctaccttgagatagagttctgcttgaaacataggagctgccctcctggatttggagtggtgcaagctggaaccccagagcgaaatacagtttgcaaaagatgtccagatgggttcttctcaaatgagacgtcatctaaagcaccctgtagaaaacacacaaattgcagtgtctttggtctcctgctaactcagaaaggaaatgcaacacacgacaacatatgttccggaaacagtgaatcaactcaaaaatgtggaatagatgttaccctgtgtgaggaggcattcttcaggtttgctgttcctacaaagtttacgcctaactggcttagtgtcttggtagacaatttgcctggcaccaaagtaaacgcagagagtgtagagaggataaaacggcaacacagctcacaagaacagactttccagctgctgaagttatggaaacatcaaaacaaagaccaagatatagtcaagaagatcatccaagatattgacctctgtgaaaacagcgtgcagcggcacattggacatgctaacctcaccttcgagcagcttcgtagcttgatggaaagcttaccgggaaagaaagtgggagcagaagacattgaaaaaacaataaaggcatgcaaacccagtgaccagatcctgaagctgctcagtttgtggcgaataaaaaatggcgaccaagacaccttgaagggcctaatgcacgcactaaagcactcaaagacgtaccactttcccaaaactgtcactcagagtctaaagaagaccatcaggttccttcacagcttcacaatgtacaaattgtatcagaagttatttttagaaatgataggtaaccaggtccaatcagtaaaaataagctgcttataa

SEQ ID NO: 292 - DNA, 390 bp, Homo sapiens
  TNFRSF12A
atggctcggggctcgctgcgccggttgctgcggctcctcgtgctggggctctggctggcgttgctgcgctccgtggccggggagcaagcgccaggcaccgccccctgctcccgcggcagctcctggagcgcggacctggacaagtgcatggactgcgcgtcttgcagggcgcgaccgcacagcgacttctgcctgggctgcgctgcagcacctcctgcccccttccggctgctttggcccatccttgggggcgctctgagcctgaccttcgtgctggggctgctttctggctttttggtctggagacgatgccgcaggagagagaagttcaccacccccatagaggagaccggcggagagggctgcccagctgtggcgctgatccagtga

SEQ ID NO: 293 - DNA, 882 bp, Homo sapiens
  TNFRSF13B
atgagtggcctgggccggagcaggcgaggtggccggagccgtgtggaccaggaggagcgctttccacagggcctgtggacgggggtggctatgagatcctgccccgaagagcagtactgggatcctctgctgggtacctgcatgtcctgcaaaaccatttgcaaccatcagagccagcgcacctgtgcagccttctgcaggtcactcagctgccgcaaggagcaaggcaagttctatgaccatctcctgagggactgcatcagctgtgcctccatctgtggacagcaccctaagcaatgtgcatacttctgtgagaacaagctcaggagcccagtgaaccttccaccagagctcaggagacagcggagtggagaagttgaaaacaattcagacaactcgggaaggtaccaaggattggagcacagaggctcagaagcaagtccagctctcccggggctgaagctgagtgcagatcaggtggccctggtctacagcacgctggggctctgcctgtgtgccgtcctctgctgcttcctggtggcggtggcctgcttcctcaagaagaggggggatccctgctcctgccagccccgctcaaggccccgtcaaagtccggccaagtcttcccaggatcacgcgatggaagccggcagccctgtgagcacatcccccgagccagtggagacctgcagcttctgcttccctgagtgcagggcgcccacgcaggagagcgcagtcacgcctgggacccccgaccccacttgtgctggaaggtgggggtgccacaccaggaccacagtcctgcagccttgcccacacatcccagacagtggccttggcattgtgtgtgtgcctgcccaggaggggggcccaggtgcataa

SEQ ID NO: 294 - DNA, 555 bp, Homo sapiens
  TNFRSF13C
atgaggcgagggccccggagcctgcggggcagggacgcgccagcccccacgccctgcgtcccggccgagtgcttcgacctgctggtccgccactgcgtggcctgcgggctcctgcgcacgccgcggccgaaaccggccggggccagcagccctgcgcccaggacggcgctgcagccgcaggagtcggtgggcgcgggggccggcgaggcggcgctgcccctgcccgggctgctctttggcgcccccgcgctgctgggcctggcactggtcctggcgctggtcctggtgggtctggtgagctggaggcggcgacagcggcggcttcgcggcgcgtcctccgcagaggcccccgacggagacaaggacgccccagagcccctggacaaggtcatcattctgtctccgggaatctctgatgccacagctcctgcctggcctcctcctggggaagacccaggaaccaccccacctggccacagtgtccctgtgccagccacagagctgggctccactgaactggtgaccaccaagacggccggccctgagcaacaatag

SEQ ID NO: 295 - DNA, 852 bp, Homo sapiens
  TNFRSF14
atggagcctcctggagactgggggcctcctccctggagatccacccccaaaaccgacgtcttgaggctggtgctgtatctcaccttcctgggagccccctgctacgccccagctctgccgtcctgcaaggaggacgagtacccagtgggctccgagtgctgccccaagtgcagtccaggttatcgtgtgaaggaggcctgcggggagctgacgggcacagtgtgtgaaccctgccctccaggcacctacattgcccacctcaatggcctaagcaagtgtctgcagtgccaaatgtgtgacccagccatgggcctgcgcgcgagccggaactgctccaggacagagaacgccgtgtgtggctgcagcccaggccacttctgcatcgtccaggacggggaccactgcgccgcgtgccgcgcttacgccacctccagcccgggccagagggtgcagaagggaggcaccgagagtcaggacaccctgtgtcagaactgccccccggggaccttctctcccaatgggaccctggaggaatgtcagcaccagaccaagtgcagctggctggtgacgaaggccggagctgggaccagcagctcccactgggtatggtggtttctctcagggagcctcgtcatcgtcattgtttgctccacagttggcctaatcatatgtgtgaaaagaagaaagccaaggggtgatgtagtcaaggtgatcgtctccgtccagcggaaaagacaggaggcagaaggtgaggccacagtcattgaggccctgcaggcccctccggacgtcaccacggtggccgtggaggagacaataccctcattcacggggaggagcccaaaccactga

SEQ ID NO: 296 - DNA, 1284 bp, Homo sapiens
  NGFR
atgggggcaggtgccaccggccgcgccatggacgggccgcgcctgctgctgttgctgcttctgggggtgtcccttggaggtgccaaggaggcatgccccacaggcctgtacacacacagcggtgagtgctgcaaagcctgcaacctgggcgagggtgtggcccagccttgtggagccaaccagaccgtgtgtgagccctgcctggacagcgtgacgttctccgacgtggtgagcgcgaccgagccgtgcaagccgtgcaccgagtgcgtggggctccagagcatgtcggcgccgtgcgtggaggccgacgacgccgtgtgccgctgcgcctacggctactaccaggatgagacgactgggcgctgcgaggcgtgccgcgtgtgcgaggcgggctcgggcctcgtgttctcctgccaggacaagcagaacaccgtgtgcgaggagtgccccgacggcacgtattccgacgaggccaaccacgtggacccgtgcctgccctgcaccgtgtgcgaggacaccgagcgccagctccgcgagtgcacacgctgggccgacgccgagtgcgaggagatccctggccgttggattacacggtccacacccccagagggctcggacagcacagcccccagcacccaggagcctgaggcacctccagaacaagacctcatagccagcacggtggcaggtgtggtgaccacagtgatgggcagctcccagcccgtggtgacccgaggcaccaccgacaacctcatccctgtctattgctccatcctggctgctgtggttgtgggccttgtggcctacatagccttcaagaggtggaacagctgcaagcagaacaagcaaggagccaacagccggccagtgaaccagacgcccccaccagagggagaaaaactccacagcgacagtggcatctccgtggacagccagagcctgcatgaccagcagccccacacgcagacagcctcgggccaggccctcaagggtgacggaggcctctacagcagcctgcccccagccaagcgggaggaggtggagaagcttctcaacggctctgcgggggacacctggcggcacctggcgggcgagctgggctaccagcccgagcacatagactcctttacccatgaggcctgccccgttcgcgccctgcttgcaagctgggccacccaggacagcgccacactggacgccctcctggccgccctgcgccgcatccagcgagccgacctcgtggagagtctgtgcagtgagtccactgccacatccccggtgtga

SEQ ID NO: 297 - DNA, 555 bp, Homo sapiens
  TNFRSF17
atgttgcagatggctgggcagtgctcccaaaatgaatattttgacagtttgttgcatgcttgcataccttgtcaacttcgatgttcttctaatactcctcctctaacatgtcagcgttattgtaatgcaagtgtgaccaattcagtgaaaggaacgaatgcgattctctggacctgtttgggactgagcttaataatttctttggcagttttcgtgctaatgtttttgctaaggaagataaactctgaaccattaaaggacgagtttaaaaacacaggatcaggtctcctgggcatggctaacattgacctggaaaagagcaggactggtgatgaaattattcttccgagaggcctcgagtacacggtggaagaatgcacctgtgaagactgcatcaagagcaaaccgaaggtcgactctgaccattgctttccactcccagctatggaggaaggcgcaaccattcttgtcaccacgaaaacgaatgactattgcaagagcctgccagctgctttgagtgctacggagatagagaaatcaatttctgctaggtaa

SEQ ID NO: 298 - DNA, 1254 bp, Homo sapiens
  TNFRSF19
atggctttaaaagtgctactagaacaagagaaaacgtttttcactcttttagtattactaggctatttgtcatgtaaagtgacttgtgaatcaggagactgtagacagcaagaattcagggatcggtctggaaactgtgttccctgcaaccagtgtgggccaggcatggagttgtctaaggaatgtggcttcggctatggggaggatgcacagtgtgtgacgtgccggctgcacaggttcaaggaggactggggcttccagaaatgcaagccctgtctggactgcgcagtggtgaaccgctttcagaaggcaaattgttcagccaccagtgatgccatctgcggggactgcttgccaggattttataggaagacgaaacttgtcggctttcaagacatggagtgtgtgccttgtggagaccctcctcctccttacgaaccgcactgtgccagcaaggtcaacctcgtgaagatcgcgtccacggcctccagcccacgggacacggcgctggctgccgttatctgcagcgctctggccaccgtcctgctggccctgctcatcctctgtgtcatctattgtaagagacagtttatggagaagaaacccagctggtctctgcggtcacaggacattcagtacaacggctctgagctgtcgtgttttgacagacctcagctccacgaatatgcccacagagcctgctgccagtgccgccgtgactcagtgcagacctgcgggccggtgcgcttgctcccatccatgtgctgtgaggaggcctgcagccccaacccggcgactcttggttgtggggtgcattctgcagccagtcttcaggcaagaaacgcaggcccagccggggagatggtgccgactttcttcggatccctcacgcagtccatctgtggcgagttttcagatgcctggcctctgatgcagaatcccatgggtggtgacaacatctctttttgtgactcttatcctgaactcactggagaagacattcattctctcaatccagaacttgaaagctcaacgtctttggattcaaatagcagtcaagatttggttggtggggctgttccagtccagtctcattctgaaaactttacagcagctactgatttatctagatataacaacacactggtagaatcagcatcaactcaggatgcactaactatgagaagccagctagatcaggagagtggtgctgtcatccacccagccactcagacgtccctccaggaagcttaa

SEQ ID NO: 299 - DNA, 1293 bp, Homo sapiens
  RELT
atgaagccaagtctgctgtgccggcccctgtcctgcttccttatgctgctgccctggcctctcgccaccctgacatcaacaaccctttggcagtgcccacctggggaggagcccgacctggacccagggcagggcacattatgcaggccctgccccccaggcaccttctcagctgcatggggctccagcccatgccagccccatgcccgttgcagcctttggaggaggctggaggcccaggtgggcatggcaactcgagatacactctgtggagactgctggcctgggtggtttgggccttggggggttccccgcgttccatgtcaaccatgttcctgggcacctctgggtactcatggctgtgatgagtgggggcggcgggcccgacgtggcgtggaggtggcagcaggggccagcagcggtggtgagacacggcagcctgggaacggcacccgggcaggtggcccagaggagacagccgcccagtacgcggtcatcgccatcgtccctgtcttctgcctcatggggctgttgggcatcctggtgtgcaacctcctcaagcggaagggctaccactgcacggcgcacaaggaggtcgggcccggccctggaggtggaggcagtggaatcaaccctgcctaccggactgaggatgccaatgaggacaccattggggtcctggtgcgcttgatcacagagaagaaagagaatgctgcggccctggaggagctgctgaaagagtaccacagcaaacagctggtgcagacgagccacaggcctgtgtccaagctgccgccagcgcccccgaacgtgccacacatctgcccgcaccgccaccatctccacaccgtgcagggcctggcctcgctctctggcccctgctgctcccgctgtagccagaagaagtggcccgaggtgctgctgtcccctgaggctgtagccgccactactcctgttcccagccttctgcctaacccgaccagggttcccaaggccggggccaaggcagggcgtcagggcgagatcaccatcttgtctgtgggcaggttccgcgtggctcgaattcctgagcagcggacaagttcaatggtgtctgaggtgaagaccatcacggaggctgggccctcgtggggtgatctccctgactccccacagcctggcctcccccctgagcagcaggccctgctaggaagtggcggaagccgtacaaagtggctgaagcccccagcagagaacaaggccgaggagaaccgctatgtggtccggctaagtgagagcaacctggtcatctga

SEQ ID NO: 300 - DNA, 1968 bp, Homo sapiens
  TNFRSF21
atggggacctctccgagcagcagcaccgccctcgcctcctgcagccgcatcgcccgccgagccacagccacgatgatcgcgggctcccttctcctgcttggattccttagcaccaccacagctcagccagaacagaaggcctcgaatctcattggcacataccgccatgttgaccgtgccaccggccaggtgctaacctgtgacaagtgtccagcaggaacctatgtctctgagcattgtaccaacacaagcctgcgcgtctgcagcagttgccctgtggggacctttaccaggcatgagaatggcatagagaaatgccatgactgtagtcagccatgcccatggccaatgattgagaaattaccttgtgctgccttgactgaccgagaatgcacttgcccacctggcatgttccagtctaacgctacctgtgccccccatacggtgtgtcctgtgggttggggtgtgcggaagaaagggacagagactgaggatgtgcggtgtaagcagtgtgctcggggtaccttctcagatgtgccttctagtgtgatgaaatgcaaagcatacacagactgtctgagtcagaacctggtggtgatcaagccggggaccaaggagacagacaacgtctgtggcacactcccgtccttctccagctccacctcaccttcccctggcacagccatctttccacgccctgagcacatggaaacccatgaagtcccttcctccacttatgttcccaaaggcatgaactcaacagaatccaactcttctgcctctgttagaccaaaggtactgagtagcatccaggaagggacagtccctgacaacacaagctcagcaagggggaaggaagacgtgaacaagaccctcccaaaccttcaggtagtcaaccaccagcaaggcccccaccacagacacatcctgaagctgctgccgtccatggaggccactgggggcgagaagtccagcacgcccatcaagggccccaagaggggacatcctagacagaacctacacaagcattttgacatcaatgagcatttgccctggatgattgtgcttttcctgctgctggtgcttgtggtgattgtggtgtgcagtatccggaaaagctcgaggactctgaaaaaggggccccggcaggatcccagtgccattgtggaaaaggcagggctgaagaaatccatgactccaacccagaaccgggagaaatggatctactactgcaatggccatggtatcgatatcctgaagcttgtagcagcccaagtgggaagccagtggaaagatatctatcagtttctttgcaatgccagtgagagggaggttgctgctttctccaatgggtacacagccgaccacgagcgggcctacgcagctctgcagcactggaccatccggggccccgaggccagcctcgcccagctaattagcgccctgcgccagcaccggagaaacgatgttgtggagaagattcgtgggctgatggaagacaccacccagctggaaactgacaaactagctctcccgatgagccccagcccgcttagcccgagccccatccccagccccaacgcgaaacttgagaattccgctctcctgacggtggagccttccccacaggacaagaacaagggcttcttcgtggatgagtcggagccccttctccgctgtgactctacatccagcggctcctccgcgctgagcaggaacggttcctttattaccaaagaaaagaaggacacagtgttgcggcaggtacgcctggacccctgtgacttgcagcctatctttgatgacatgctccactttctaaatcctgaggagctgcgggtgattgaagagattccccaggctgaggacaaactagaccggctattcgaaattattggagtcaagagccaggaagccagccagaccctcctggactctgtttatagccatcttcctgacctgctgtag

SEQ ID NO: 301 - DNA, 1254 bp, Homo sapiens
  TNFRSF25
atggagcagcggccgcggggctgcgcggcggtggcggcggcgctcctcctggtgctgctgggggcccgggcccagggcggcactcgtagccccaggtgtgactgtgccggtgacttccacaagaagattggtctgttttgttgcagaggctgcccagcggggcactacctgaaggccccttgcacggagccctgcggcaactccacctgccttgtgtgtccccaagacaccttcttggcctgggagaaccaccataattctgaatgtgcccgctgccaggcctgtgatgagcaggcctcccaggtggcgctggagaactgttcagcagtggccgacacccgctgtggctgtaagccaggctggtttgtggagtgccaggtcagccaatgtgtcagcagttcacccttctactgccaaccatgcctagactgcggggccctgcaccgccacacacggctactctgttcccgcagagatactgactgtgggacctgcctgcctggcttctatgaacatggcgatggctgcgtgtcctgccccacgagcaccctggggagctgtccagagcgctgtgccgctgtctgtggctggaggcagatgttctgggtccaggtgctcctggctggccttgtggtccccctcctgcttggggccaccctgacctacacataccgccactgctggcctcacaagcccctggttactgcagatgaagctgggatggaggctctgaccccaccaccggccacccatctgtcacccttggacagcgcccacacccttctagcacctcctgacagcagtgagaagatctgcaccgtccagttggtgggtaacagctggacccctggctaccccgagacccaggaggcgctctgcccgcaggtgacatggtcctgggaccagttgcccagcagagctcttggccccgctgctgcgcccacactctcgccagagtccccagccggctcgccagccatgatgctgcagccgggcccgcagctctacgacgtgatggacgcggtcccagcgcggcgctggaaggagttcgtgcgcacgctggggctgcgcgaggcagagatcgaagccgtggaggtggagatcggccgcttccgagaccagcagtacgagatgctcaagcgctggcgccagcagcagcccgcgggcctcggagccgtttacgcggccctggagcgcatggggctggacggctgcgtggaagacttgcgcagccgcctgcagcgcggcccgtga

SEQ ID NO: 302 - DNA, 1347 bp, Homo sapiens
  EDAR
atggcccatgtgggggactgcacgcagacgccctggctccccgtcctggtggtgtctctgatgtgctcagcccgagcggaatactcaaactgcggtgagaacgagtactacaaccagactacggggctgtgccaggagtgccccccgtgtgggccgggagaggagccctacctgtcctgtggctacggcaccaaagacgaggactacggctgcgtcccctgcccggcggagaagttttccaaaggaggctaccagatatgcaggcgtcacaaagactgtgagggcttcttccgggccaccgtgctgacaccaggggacatggagaatgacgctgagtgtggcccttgcctccctggctactacatgctggagaacagaccgaggaacatctatggcatggtctgctactcctgcctcctggcaccccccaacaccaaggaatgtgtgggagccacttcaggagcttctgccaacttccctggcacctcgggcagcagcaccctgtctcccttccagcacgcccacaaagaactctcaggccaaggacacctggccactgccctgatcattgcaatgtccaccatcttcatcatggccatcgccatcgtcctcatcatcatgttctacatcctgaagacaaagccctctgccccagcctgttgcaccagccacccggggaagagcgtggaggcccaagtgagcaaggacgaggagaagaaagaggccccagacaacgtggtgatgttctccgagaaggatgaatttgagaagctgacagcaactccagcaaagcccaccaagagcgagaacgatgcctcatccgagaatgagcagctgctgagccggagcgtcgacagtgatgaggagcccgcccctgacaagcagggctccccggagctgtgcctgctgtcgctggttcacctggccagggagaagtctgccaccagcaacaagtcagccgggattcaaagccggaggaaaaagatcctcgatgtgtatgccaacgtgtgtggagtcgtggaaggtcttagccccacggagctgccatttgattgcctcgagaagactagccgaatgctcagctccacgtacaactctgagaaggctgttgtgaaaacgtggcgccacctcgccgagagcttcggcctgaagagggatgagattgggggcatgacagacggcatgcaactctttgaccgcatcagcacggcaggctacagcatccctgagctactcacaaaactggtgcagattgagcggctggatgctgtggagtccttgtgtgcagacatactggagtgggcgggggttgtgccacctgcctcccagccacatgctgcatcctga

SEQ ID NO: 303 - DNA, 894 bp, Homo sapiens
  EDA2R
atggattgccaagaaaatgagtactgggaccaatggggacggtgtgtcacctgccaacggtgtggtcctggacaggagctatccaaggattgtggttatggagagggtggagatgcctactgcacagcctgccctcctcgcaggtacaaaagcagctggggccaccacagatgtcagagttgcatcacctgtgctgtcatcaatcgtgttcagaaggtcaactgcacagctacctctaatgctgtctgtggggactgtttgcccaggttctaccgaaagacacgcattggaggcctgcaggaccaagagtgcatcccgtgcacgaagcagacccccacctctgaggttcaatgtgccttccagttgagcttagtggaggcagatacacccacagtgccccctcaggaggccacacttgttgcactggtgagcagcctgctagtggtgtttaccctggccttcctggggctcttcttcctctactgcaagcagttcttcaacagacattgccagcgtggaggtttgctgcagtttgaggctgataaaacagcaaaggaggaatctctcttccccgtgccacccagcaaggagaccagtgctgagtcccaagtgagtgagaacatctttcagacccagccacttaaccctatcctcgaggacgactgcagctcgactagtggcttccccacacaggagtcctttaccatggcctcctgcacctcagagagccactcccactgggtccacagccccatcgaatgcacagagctggacctgcaaaagttttccagctctgcctcctatactggagctgagaccttggggggaaacacagtcgaaagcactggagacaggctggagctcaatgtgccctttgaagttcccagcccttaa

SEQ ID NO: 304 - DNA, 1137 bp, Artificial Sequence
  STING (R232 Allele)
  allele (694)...(696): nnn = CGT, CGC, CGA, CGG, AGA or AGG
atgccccactccagcctgcatccatccatcccgtgtcccaggggtcacggggcccagaaggcagccttggttctgctgagtgcctgcctggtgaccctttgggggctaggagagccaccagagcacactctccggtacctggtgctccacctagcctccctgcagctgggactgctgttaaacggggtctgcagcctggctgaggagctgcgccacatccactccaggtaccggggcagctactggaggactgtgcgggcctgcctgggctgccccctccgccgtggggccctgttgctgctgtccatctatttctactactccctcccaaatgcggtcggcccgcccttcacttggatgcttgccctcctgggcctctcgcaggcactgaacatcctcctgggcctcaagggcctggccccagctgagatctctgcagtgtgtgaaaaagggaatttcaacgtggcccatgggctggcatggtcatattacatcggatatctgcggctgatcctgccagagctccaggcccggattcgaacttacaatcagcattacaacaacctgctacggggtgcagtgagccagcggctgtatattctcctcccattggactgtggggtgcctgataacctgagtatggctgaccccaacattcgcttcctggataaactgccccagcagaccggtgacnnngctggcatcaaggatcgggtttacagcaacagcatctatgagcttctggagaacgggcagcgggcgggcacctgtgtcctggagtacgccacccccttgcagactttgtttgccatgtcacaatacagtcaagctggctttagccgggaggataggcttgagcaggccaaactcttctgccggacacttgaggacatcctggcagatgcccctgagtctcagaacaactgccgcctcattgcctaccaggaacctgcagatgacagcagcttctcgctgtcccaggaggttctccggcacctgcggcaggaggaaaaggaagaggttactgtgggcagcttgaagacctcagcggtgcccagtacctccacgatgtcccaagagcctgagctcctcatcagtggaatggaaaagcccctccctctccgcacggatttctct

SEQ ID NO: 305 - protein, 379 aa, Homo sapiens [sequence omitted]

SEQ ID NO: 306 - protein, 379 aa, Homo sapiens
  Human STING (H232 Allele)
MPHSSLHPSIPCPRGHGAQKAALVLLSACLVTLWGLGEPPEHTLRYLVLHLASLQLGLLLNGVCSLAEELRHIHSRYRGSYWRTVRACLGCPLRRGALLLLSIYFYYSLPNAVGPPFTWMLALLGLSQALNILLGLKGLAPAEISAVCEKGNFNVAHGLAWSYYIGYLRLILPELQARIRTYNQHYNNLLRGAVSQRLYILLPLDCGVPDNLSMADPNIRFLDKLPQQTGDHAGIKDRVYSNSIYELLENGQRAGTCVLEYATPLQTLFAMSQYSQAGFSREDRLEQAKLFCRTLEDILADAPESQNNCRLIAYQEPADDSSFSLSQEVLRHLRQEEKEEVTVGSLKTSAVPSTSTMSQEPELLISGMEKPLPLRTDFS

SEQ ID NO: 307 - protein, 379 aa, Homo sapiens [sequence omitted]

SEQ ID NO: 308 - protein, 379 aa, Homo sapiens
  Human STING (HAQ allele; R71H/G230A/R293Q)
MPHSSLHPSIPCPRGHGAQKAALVLLSACLVTLWGLGEPPEHTLRYLVLHLASLQLGLLLNGVCSLAEELHHIHSRYRGSYWRTVRACLGCPLRRGALLLLSIYFYYSLPNAVGPPFTWMLALLGLSQALNILLGLKGLAPAEISAVCEKGNFNVAHGLAWSYYIGYLRLILPELQARIRTYNQHYNNLLRGAVSQRLYILLPLDCGVPDNLSMADPNIRFLDKLPQQTADHAGIKDRVYSNSIYELLENGQRAGTCVLEYATPLQTLFAMSQYSQAGFSREDRLEQAKLFCQTLEDILADAPESQNNCRLIAYQEPADDSSFSLSQEVLRHLRQEEKEEVTVGSLKTSAVPSTSTMSQEPELLISGMEKPLPLRTDFS

SEQ ID NO: 309 - protein, 379 aa, Homo sapiens
  Human STING (AQ allele; G230A/R293Q)
MPHSSLHPSIPCPRGHGAQKAALVLLSACLVTLWGLGEPPEHTLRYLVLHLASLQLGLLLNGVCSLAEELRHIHSRYRGSYWRTVRACLGCPLRRGALLLLSIYFYYSLPNAVGPPFTWMLALLGLSQALNILLGLKGLAPAEISAVCEKGNFNVAHGLAWSYYIGYLRLILPELQARIRTYNQHYNNLLRGAVSQRLYILLPLDCGVPDNLSMADPNIRFLDKLPQQTADHAGIKDRVYSNSIYELLENGQRAGTCVLEYATPLQTLFAMSQYSQAGFSREDRLEQAKLFCQTLEDILADAPESQNNCRLIAYQEPADDSSFSLSQEVLRHLRQEEKEEVTVGSLKTSAVPSTSTMSQEPELLISGMEKPLPLRTDFS

SEQ ID NO: 310 - protein, 1025 aa, Homo sapiens [sequence omitted]

SEQ ID NO: 311 - protein, 925 aa, Homo sapiens
  RIG-I/DDX58
MTTEQRRSLQAFQDYIRKTLDPTYILSYMAPWFREEEVQYIQAEKNNKGPMEAATLFLKFLLELQEEGWFRGFLDALDHAGYSGLYEAIESWDFKKIEKLEEYRLLLKRLQPEFKTRIIPTDIISDLSECLINQECEEILQICSTKGMMAGAEKLVECLLRSDKENWPKTLKLALEKERNKFSELWIVEKGIKDVETEDLEDKMETSDIQIFYQEDPECQNLSENSCPPSEVSDTNLYSPFKPRNYQLELALPAMKGKNTIICAPTGCGKTFVSLLICEHHLKKFPQGQKGKVVFFANQIPVYEQQKSVFSKYFERHGYRVTGISGATAENVPVEQIVENNDIIILTPQILVNNLKKGTIPSLSIFTLMIFDECHNTSKQHPYNMIMFNYLDQKLGGSSGPLPQVIGLTASVGVGDAKNTDEALDYICKLCASLDASVIATVKHNLEELEQVVYKPQKFFRKVESRISDKFKYIIAQLMRDTESLAKRICKDLENLSQIQNREFGTQKYEQWIVTVQKACMVFQMPDKDEESRICKALFLYTSHLRKYNDALIISEHARMKDALDYLKDFFSNVRAAGFDEIEQDLTQRFEEKLQELESVSRDPSNENPKLEDLCFILQEEYHLNPETITILFVKTRALVDALKNWIEGNPKLSFLKPGILTGRGKTNQNTGMTLPAQKCILDAFKASGDHNILIATSVADEGIDIAQCNLVILYEYVGNVIKMIQTRGRGRARGSKCFLLTSNAGVIEKEQINMYKEKMMNDSILRLQTWDEAVFREKILHIQTHEKFIRDSQEKPKPVPDKENKKLLCRKCKALACYTADVRVIEECHYTVLGDAFKECFVSRPHPKPKQFSSFEKRAKIFCARQNCSHDWGIHVKYKTFEIPVIKIESFVVEDIATGVQTLYSKWKDFHFEKIPFDPAEMSK

SEQ ID NO: 312 - protein, 427 aa, Homo sapiens
  IRF-3, isoform 1
MGTPKPRILPWLVSQLDLGQLEGVAWVNKSRTRFRIPWKHGLRQDAQQEDFGIFQAWAEATGAYVPGRDKPDLPTWKRNFRSALNRKEGLRLAEDRSKDPHDPHKIYEFVNSGVGDFSQPDTSPDTNGGGSTSDTQEDILDELLGNMVLAPLPDPGPPSLAVAPEPCPQPLRSPSLDNPTPFPNLGPSENPLKRLLVPGEEWEFEVTAFYRGRQVFQQTISCPEGLRLVGSEVGDRTLPGWPVTLPDPGMSLTDRGVMSYVRHVLSCLGGGLALWRAGQWLWAQRLGHCHTYWAVSEELLPNSGHGPDGEVPKDKEGGVFDLGPFIVDLITFTEGSGRSPRYALWFCVGESWPQDQPWTKRLVMVKVVPTCLRALVEMARVGGASSLENTVDLHISNSHPLSLTSDQYKAYLQDLVEGMDFQGPGES

SEQ ID NO: 313 - protein, 503 aa, Homo sapiens
  IRF-7, isoform A
MALAPERAAPRVLFGEWLLGEISSGCYEGLQWLDEARTCFRVPWKHFARKDLSEADARIFKAWAVARGRWPPSSRGGGPPPEAETAERAGWKTNFRCALRSTRRFVMLRDNSGDPADPHKVYALSRELCWREGPGTDQTEAEAPAAVPPPQGGPPGPFLAHTHAGLQAPGPLPAPAGDKGDLLLQAVQQSCLADHLLTASWGADPVPTKAPGEGQEGLPLTGACAGGPGLPAGELYGWAVETTPSPGPQPAALTTGEAAAPESPHQAEPYLSPSPSACTAVQEPSPGALDVTIMYKGRTVLQKVVGHPSCTFLYGPPDPAVRATDPQQVAFPSPAELPDQKQLRYTEELLRHVAPGLHLELRGPQLWARRMGKCKVYWEVGGPPGSASPSTPACLLPRNCDTPIFDFRVFFQELVEFRARQRRGSPRYTIYLGFGQDLSAGRPKEKSLVLVKLEPWLCRVHLEGTQREGVSSLDSSSLSLCLSSANSLYDDIECFLMELEQPA

SEQ ID NO: 314 - DNA, 1184 bp, Artificial Sequence
  Elongation factor 1 (EF1) alpha promoter
cgtgaggctccggtgcccgtcagtgggcagagcgcacatcgcccacagtccccgagaagttggggggaggggtcggcaattgaaccggtgcctagagaaggtggcgcggggtaaactgggaaagtgatgtcgtgtactggctccgcctttttcccgagggtgggggagaaccgtatataagtgcagtagtcgccgtgaacgttctttttcgcaacgggtttgccgccagaacacaggtaagtgccgtgtgtggttcccgcgggcctggcctctttacgggttatggcccttgcgtgccttgaattacttccacctggctgcagtacgtgattcttgatcccgagcttcgggttggaagtgggtgggagagttcgaggccttgcgcttaaggagccccttcgcctcgtgcttgagttgaggcctggcctgggcgctggggccgccgcgtgcgaatctggtggcaccttcgcgcctgtctcgctgctttcgataagtctctagccatttaaaatttttgatgacctgctgcgacgctttttttctggcaagatagtcttgtaaatgcgggccaagatctgcacactggtatttcggtttttggggccgcgggcggcgacggggcccgtgcgtcccagcgcacatgttcggcgaggcggggcctgcgagcgcggccaccgagaatcggacgggggtagtctcaagctggccggcctgctctggtgcctggcctcgcgccgccgtgtatcgccccgccctgggcggcaaggctggcccggtcggcaccagttgcgtgagcggaaagatggccgcttcccggccctgctgcagggagctcaaaatggaggacgcggcgctcgggagagcgggcgggtgagtcacccacacaaaggaaaagggcctttccgtcctcagccgtcgcttcatgtgactccacggagtaccgggcgccgtccaggcacctcgattagttctcgagcttttggagtacgtcgtctttaggttggggggaggggttttatgcgatggagtttccccacactgagtgggtggagactgaagttaggccagcttggcacttgatgtaattctccttggaatttgccctttttgagtttggatcttggttcattctcaagcctcagacagtggttcaaagtttttttcttccatttcaggtgtcgtga

SEQ ID NO: 315 - DNA, 20 bp, Artificial Sequence
  pagp-1 primer
gcgtgacggttctgagtgct

SEQ ID NO: 316 - DNA, 21 bp, Artificial Sequence
  pagp-2 primer
cgtctttgctgccatcttccg

SEQ ID NO: 317 - DNA, 24 bp, Artificial Sequence
  pagp-3 primer
acaataacgacgactccgataagg

SEQ ID NO: 318 - DNA, 24 bp, Artificial Sequence
  pagp-4 primer
ctgctgaatgtgctgattaacctg

SEQ ID NO: 319 - DNA, 23 bp, Artificial Sequence
  ansb-1 primer
accttagaagatagccgcaaagc

SEQ ID NO: 320 - DNA, 25 bp, Artificial Sequence
  ansb-2 primer
cagagacatgacacccacgattatc

SEQ ID NO: 321 - DNA, 21 bp, Artificial Sequence
  ansb-3 primer
gcaaaccgctatccagaacga

SEQ ID NO: 322 - DNA, 24 bp, Artificial Sequence
  ansb-4 primer
agtttaagtatgccgtggtactgc

SEQ ID NO: 323 - DNA, 28 bp, Artificial Sequence
  csgd-1 primer
cacttgctttaagatttgtaatggctag

SEQ ID NO: 324 - DNA, 24 bp, Artificial Sequence
  csgd-2 primer
ggtgtattcgctttcccatttgtc

SEQ ID NO: 325 - DNA, 21 bp, Artificial Sequence
  csgd-3 primer
tgtgctgtccaggttaatgcc

SEQ ID NO: 326 - DNA, 23 bp, Artificial Sequence
  csgd-4 primer
gacgacggttttctcgaagtctc

SEQ ID NO: 327 - protein, 18 aa, Artificial Sequence
  T2A peptide
EGRGSLLTCGDVEENPGP

SEQ ID NO: 328 - protein, 19 aa, Artificial Sequence
  P2A peptide
ATNFSLLKQAGDVEENPGP

SEQ ID NO: 329 - protein, 20 aa, Artificial Sequence
  E2A peptide
QCTNYALLKLAGDVESNPGP

SEQ ID NO: 330 - protein, 22 aa, Artificial Sequence
  F2A peptide
VKQTLNFDLLKLAGDVESNPGP

SEQ ID NO: 331 - DNA, 3199 bp, Artificial Sequence
  Plasmid pSL0191
gacgaaagggcctcgtgatacgcctatttttataggttaatgtcatgataataatggtttcttagacgtcaggtggcacttttcggggaaatgtgcgcggaacccctatttgtttatttttctaaatacattcaaatatgtatccgctcatgagacaataaccctgataaatgcttcaataatattgaaaaaggaagagtatgagtattcaacatttccgtgtcgcccttattcccttttttgcggcattttgccttcctgtttttgctcacccagaaacgctggtgaaagtaaaagatgctgaagatcagttgggtgcacgagtgggttacatcgaactggatctcaacagcggtaagatccttgagagttttcgccccgaagaacgttttccaatgatgagcacttttaaagttctgctatgtggcgcggtattatcccgtattgacgccgggcaagagcaactcggtcgccgcatacactattctcagaatgacttggttgagtactcaccagtcacagaaaagcatcttacggatggcatgacagtaagagaattatgcagtgctgccataaccatgagtgataacactgcggccaacttacttctgacaacgatcggaggaccgaaggagctaaccgcttttttgcacaacatgggggatcatgtaactcgccttgatcgttgggaaccggagctgaatgaagccataccaaacgacgagcgtgacaccacgatgcctgtagcaatggcaacaacgttgcgcaaactattaactggcgaactacttactctagcttcccggcaacaattaatagactggatggaggcggataaagttgcaggaccacttctgcgctcggcccttccggctggctggtttattgctgataaatctggagccggtgagcgtgggtctcgcggtatcattgcagcactggggccagatggtaagccctcccgtatcgtagttatctacacgacggggagtcaggcaactatggatgaacgaaatagacagatcgctgagataggtgcctcactgattaagcattggtaactgtcagaccaagtttactcatatatactttagattgatttaaaacttcatttttaatttaaaaggatctaggtgaagatcctttttgataatctcatgaccaaaatcccttaacgtgagttttcgttccactgagcgtcagaccccgtagaaaagatcaaaggatcttcttgagatcctttttttctgcgcgtaatctgctgcttgcaaacaaaaaaaccaccgctaccagcggtggtttgtttgccggatcaagagctaccaactctttttccgaaggtaactggcttcagcagagcgcagataccaaatactgttcttctagtgtagccgtagttaggccaccacttcaagaactctgtagcaccgcctacatacctcgctctgctaatcctgttaccagtggctgctgccagtggcgataagtcgtgtcttaccgggttggactcaagacgatagttaccggataaggcgcagcggtcgggctgaacggggggttcgtgcacacagcccagcttggagcgaacgacctacaccgaactgagatacctacagcgtgagctatgagaaagcgccacgcttcccgaagggagaaaggcggacaggtatccggtaagcggcagggtcggaacaggagagcgcacgagggagcttccagggggaaacgcctggtatctttatagtcctgtcgggtttcgccacctctgacttgagcgtcgatttttgtgatgctcgtcaggggggcggagcctatggaaaaacgccagcaacgcggcctttttacggttcctggccttttgctggccttttgctcacatgttctttcctgcgttatcccctgattctgtggataaccgtattaccgcctttgagtgagctgataccgctcgccgcagccgaacgaccgagcgcagcgagtcagtgagcgaggaagcggaagagcgcccaatacgcaaaccgcctctccccgcgcgttggccgattcattaatgcagctggcacgacaggtttcccgactggaaagcgggcagtgagcgcaacgcaattaatgtgagttagctcactcattaggcaccccaggctttacactttatgcttccggctcgtatgttgtgtggaattgtgagcggataacaatttcacacaggaaacagctatgaccatgattacgccaagctcggcgcgccattgggatggaaccgcgtgacggttctgagtgctaaatcaaacgccgttaacccgatactctctcagattattctctgtttatagtttgttaagattttattcaggttaatgttgttattatcacagtcgaatttttgaacggtatgtatgttgcgatgatcatcagaaagtattttcttattattgctctccttttgatgccatggctggctattcgctagcctcaataagcttcttgcctttctgcaggttttgatggggaagggtatgcttcagttgtgaattaaaaagtcttaaaaaacaataagtagatagagttagctaaaaattaacgcgatatttatcactttttcgcaaagttcgactggacaaaatgcatcacaattgttgtactggtatccgacacagcatttgtgtctatttttcatgtaaaggtaattttgatgtctaagattaaaggtaacgttaagtggtttaatgaatccaaaggattcggtttcattactccggaagatggcagcaaagacgtggttccatcccaatacgcgtcaattcactggccgtcgttttacaacgtcgtgactgggaaaaccctggcgttacccaacttaatcgccttgcagcacatccccctttcgccagctggcgtaatagcgaagaggcccgcaccgatcgcccttcccaacagttgcgcagcctgaatggcgaatggcgcctgatgcggtattttctccttacgcatctgtgcggtatttcacaccgcatatggtgcactctcagtacaatctgctctgatgccgcatagttaagccagccccgacacccgccaacacccgctgacgcgccctgacgggcttgtctgctcccggcatccgcttacagacaagctgtgaccgtctccgggagctgcatgtgtcagaggttttcaccgtcatcaccgaaacgcgcga

SEQ ID NO: 332 - DNA, 3214 bp, Artificial Sequence
  Plasmid pSL0230
tcgcgcgtttcggtgatgacggtgaaaacctctgacacatgcagctcccggagacggtcacagcttgtctgtaagcggatgccgggagcagacaagcccgtcagggcgcgtcagcgggtgttggcgggtgtcggggctggcttaactatgcggcatcagagcagattgtactgagagtgcaccatatgcggtgtgaaataccgcacagatgcgtaaggagaaaataccgcatcaggcgccattcgccattcaggctgcgcaactgttgggaagggcgatcggtgcgggcctcttcgctattacgccagctggcgaaagggggatgtgctgcaaggcgattaagttgggtaacgccagggttttcccagtcacgacgttgtaaaacgacggccagtgaattgacgcgtattgggattgaccttagaagatagccgcaaagcgctggttggcagcctgaagtaatctttcctttttaaacaatggcgcagatcgtatctgcgcctttttattctgttttttcctgcattttgttatccatctctaaaaaatactctctgtcggatatatatcgctggttaatcgtatggcgtcacattattcgtctgcaatatagagataatgcgaccagttgacataactggagatataacatggctagcctcaataagcttcttgcctttctgcagaccaaggacccagattatgtgaagttgacgatgcaaaatacggctttgtcgcttccggcacgctgaacccgcaaaaagcgcgtgtcttactgcaactggcgttaacccagactaaagatccaaaacagatccagacgatgttcaatcagtattaaagataatgccccggtcggaaggccggggctatctttggaagacctctcgcacaaccaacactattatcttgctaattatcatcctggttatgataatcgtgggtgtcatgtctctggatcccaatggcgcgccgagcttggcgtaatcatggtcatagctgtttcctgtgtgaaattgttatccgctcacaattccacacaacatacgagccggaagcataaagtgtaaagcctggggtgcctaatgagtgagctaactcacattaattgcgttgcgctcactgcccgctttccagtcgggaaacctgtcgtgccagctgcattaatgaatcggccaacgcgcggggagaggcggtttgcgtattgggcgctcttccgcttcctcgctcactgactcgctgcgctcggtcgttcggctgcggcgagcggtatcagctcactcaaaggcggtaatacggttatccacagaatcaggggataacgcaggaaagaacatgtgagcaaaaggccagcaaaaggccaggaaccgtaaaaaggccgcgttgctggcgtttttccataggctccgcccccctgacgagcatcacaaaaatcgacgctcaagtcagaggtggcgaaacccgacaggactataaagataccaggcgtttccccctggaagctccctcgtgcgctctcctgttccgaccctgccgcttaccggatacctgtccgcctttctcccttcgggaagcgtggcgctttctcatagctcacgctgtaggtatctcagttcggtgtaggtcgttcgctccaagctgggctgtgtgcacgaaccccccgttcagcccgaccgctgcgccttatccggtaactatcgtcttgagtccaacccggtaagacacgacttatcgccactggcagcagccactggtaacaggattagcagagcgaggtatgtaggcggtgctacagagttcttgaagtggtggcctaactacggctacactagaagaacagtatttggtatctgcgctctgctgaagccagttaccttcggaaaaagagttggtagctcttgatccggcaaacaaaccaccgctggtagcggtggtttttttgtttgcaagcagcagattacgcgcagaaaaaaaggatctcaagaagatcctttgatcttttctacggggtctgacgctcagtggaacgaaaactcacgttaagggattttggtcatgagattatcaaaaaggatcttcacctagatccttttaaattaaaaatgaagttttaaatcaatctaaagtatatatgagtaaacttggtctgacagttaccaatgcttaatcagtgaggcacctatctcagcgatctgtctatttcgttcatccatagttgcctgactccccgtcgtgtagataactacgatacgggagggcttaccatctggccccagtgctgcaatgataccgcgagacccacgctcaccggctccagatttatcagcaataaaccagccagccggaagggccgagcgcagaagtggtcctgcaactttatccgcctccatccagtctattaattgttgccgggaagctagagtaagtagttcgccagttaatagtttgcgcaacgttgttgccattgctacaggcatcgtggtgtcacgctcgtcgtttggtatggcttcattcagctccggttcccaacgatcaaggcgagttacatgatcccccatgttgtgcaaaaaagcggttagctccttcggtcctccgatcgttgtcagaagtaagttggccgcagtgttatcactcatggttatggcagcactgcataattctcttactgtcatgccatccgtaagatgcttttctgtgactggtgagtactcaaccaagtcattctgagaatagtgtatgcggcgaccgagttgctcttgcccggcgtcaatacgggataataccgcgccacatagcagaactttaaaagtgctcatcattggaaaacgttcttcggggcgaaaactctcaaggatcttaccgctgttgagatccagttcgatgtaacccactcgtgcacccaactgatcttcagcatcttttactttcaccagcgtttctgggtgagcaaaaacaggaaggcaaaatgccgcaaaaaagggaataagggcgacacggaaatgttgaatactcatactcttcctttttcaatattattgaagcatttatcagggttattgtctcatgagcggatacatatttgaatgtatttagaaaaataaacaaataggggttccgcgcacatttccccgaaaagtgccacctgacgtctaagaaaccattattatcatgacattaacctataaaaataggcgtatcacgaggccctttcgtc

SEQ ID NO: 333 - DNA, 3141 bp, Artificial Sequence
  Plasmid pSL0196
tcgcgcgtttcggtgatgacggtgaaaacctctgacacatgcagctcccggagacggtcacagcttgtctgtaagcggatgccgggagcagacaagcccgtcagggcgcgtcagcgggtgttggcgggtgtcggggctggcttaactatgcggcatcagagcagattgtactgagagtgcaccatatgcggtgtgaaataccgcacagatgcgtaaggagaaaataccgcatcaggcgccattcgccattcaggctgcgcaactgttgggaagggcgatcggtgcgggcctcttcgctattacgccagctggcgaaagggggatgtgctgcaaggcgattaagttgggtaacgccagggttttcccagtcacgacgttgtaaaacgacggccagtgaattgacgcgtattgggatacacttgctttaagatttgtaatggctagattgaaaacagttaaaagtattttcgtaaatatttttctctttctggataatgggctatttcaacccacagcagtgcaacatctgtcagtacttctggtgcctttattttatgggggcagctgtcagatgtgcgattaaaaaaagtggagtttcatcatgtttaatgaagtccatagtagctagcctcaataagcttcttgcctttctgcagaccaaggacccagattatgtttcatgggcaaacgataatctcaggcggtaaggccatgaaacgctatctgacctggattgtagcagcagagttactgttcgctaccggaaacctgcatgccaatgaagttgaagtcgaggttcccggattgttaaccgaccagaccgtctcttcgataggacatgaattctatcgtgcattcagcgacaaatgggaaagcgaatacaccatcccaatggcgcgccgagcttggcgtaatcatggtcatagctgtttcctgtgtgaaattgttatccgctcacaattccacacaacatacgagccggaagcataaagtgtaaagcctggggtgcctaatgagtgagctaactcacattaattgcgttgcgctcactgcccgctttccagtcgggaaacctgtcgtgccagctgcattaatgaatcggccaacgcgcggggagaggcggtttgcgtattgggcgctcttccgcttcctcgctcactgactcgctgcgctcggtcgttcggctgcggcgagcggtatcagctcactcaaaggcggtaatacggttatccacagaatcaggggataacgcaggaaagaacatgtgagcaaaaggccagcaaaaggccaggaaccgtaaaaaggccgcgttgctggcgtttttccataggctccgcccccctgacgagcatcacaaaaatcgacgctcaagtcagaggtggcgaaacccgacaggactataaagataccaggcgtttccccctggaagctccctcgtgcgctctcctgttccgaccctgccgcttaccggatacctgtccgcctttctcccttcgggaagcgtggcgctttctcatagctcacgctgtaggtatctcagttcggtgtaggtcgttcgctccaagctgggctgtgtgcacgaaccccccgttcagcccgaccgctgcgccttatccggtaactatcgtcttgagtccaacccggtaagacacgacttatcgccactggcagcagccactggtaacaggattagcagagcgaggtatgtaggcggtgctacagagttcttgaagtggtggcctaactacggctacactagaagaacagtatttggtatctgcgctctgctgaagccagttaccttcggaaaaagagttggtagctcttgatccggcaaacaaaccaccgctggtagcggtggtttttttgtttgcaagcagcagattacgcgcagaaaaaaaggatctcaagaagatcctttgatcttttctacggggtctgacgctcagtggaacgaaaactcacgttaagggattttggtcatgagattatcaaaaaggatcttcacctagatccttttaaattaaaaatgaagttttaaatcaatctaaagtatatatgagtaaacttggtctgacagttaccaatgcttaatcagtgaggcacctatctcagcgatctgtctatttcgttcatccatagttgcctgactccccgtcgtgtagataactacgatacgggagggcttaccatctggccccagtgctgcaatgataccgcgagacccacgctcaccggctccagatttatcagcaataaaccagccagccggaagggccgagcgcagaagtggtcctgcaactttatccgcctccatccagtctattaattgttgccgggaagctagagtaagtagttcgccagttaatagtttgcgcaacgttgttgccattgctacaggcatcgtggtgtcacgctcgtcgtttggtatggcttcattcagctccggttcccaacgatcaaggcgagttacatgatcccccatgttgtgcaaaaaagcggttagctccttcggtcctccgatcgttgtcagaagtaagttggccgcagtgttatcactcatggttatggcagcactgcataattctcttactgtcatgccatccgtaagatgcttttctgtgactggtgagtactcaaccaagtcattctgagaatagtgtatgcggcgaccgagttgctcttgcccggcgtcaatacgggataataccgcgccacatagcagaactttaaaagtgctcatcattggaaaacgttcttcggggcgaaaactctcaaggatcttaccgctgttgagatccagttcgatgtaacccactcgtgcacccaactgatcttcagcatcttttactttcaccagcgtttctgggtgagcaaaaacaggaaggcaaaatgccgcaaaaaagggaataagggcgacacggaaatgttgaatactcatactcttcctttttcaatattattgaagcatttatcagggttattgtctcatgagcggatacatatttgaatgtatttagaaaaataaacaaataggggttccgcgcacatttccccgaaaagtgccacctgacgtctaagaaaccattattatcatgacattaacctataaaaataggcgtatcacgaggccctttcgtc

SEQ ID NO: 334 - DNA, 1217 bp, Salmonella typhimurium
  ansB (L-asparaginase II)
tggcgcagatcgtatctgcgcctttttattctgttttttcctgcattttgttatccatctctaaaaaatactctctgtcggatatatatcgctggttaatcgtatggcgtcacattattcgtctgcaatatagagataatgcgaccagttgacataactggagatataacatggagtttttcaggaaaacggcattagctgctctggtaatgggtttcagcggcgcagcgttcgctttaccgaatatcaccatcttagcgaccggcggaacgatcgctggcggtggtgattcagcaacaaaatcaaattatacggcaggtaaagtcggcgtcgaaaatctggtggatgccgttcctcaattgaaggacattgcggtagtgaaaggcgagcaggtcgttaacattggctcgcaggatatgaacgatgaagtctggctcacgctggcgaaaaaaatcaataccgagtgcgacagcaccgacggtttcgtgatcacccacggtactgatacgatggaagagaccgcttatttcctcgatctgaccgtgaaatgcaataaaccggtggtactggtcggcgcgatgcgtccttccacgtcaatgagcgcagatggcccgttcaacctctataatgcggtagtaacagcggctgataaacagtctgccaaccgcggcgtgctggtggtaatgaatgataccgtcatggacggacgcgacgtcactaagaccaatacgactgacgtggcgacgtttaaagcggttaactacggcccgctgggttatatccacaacggtaaaattgactaccagcgtacgccagagcgtaaacataccacctccaccccgttcgacgtgtcgaagctgaccgcgttgccgaaagtcggtatcgtttataactatgcgaatgcgtccgatctgccggcaaaagcgctggtagacgcgggttatgacgggatcgtgagcgcaggagtgggtaacggcaacctgtataaaacggtctttgataccctggcgaccgccgcgcacaacggtacggtagtggtgcgttcttcacgagtgccgactggcgcaaccacgcaggatgcggaagttgacgatgcaaaatacggctttgtcgcttccggcacgctgaacccgcaaaaagcgcgtgtcttactgcaactggcgttaacccagactaaagatccaaaacagatccagacgatgttcaatcagtattaa

SEQ ID NO: 335 - DNA, 664 bp, Salmonella typhimurium
  csgD
gtggagtttcatcatgtttaatgaagtccatagtagtcatggtcacacactattgttgatcacaaagccatctctgcaagctacggcattattgcaacatttaaagcaatcgctggccataaccggaaaactgcataatattcaacgttctctggaagatatctcggccggttgcattgttttaatggatatgatggaagcggataagaagcttatccactattggcaggataatttaagccgcaaaaacaataatataaaaacattattgttaaatacccctgacgattatccctaccgtgaaattgaaaactggcctcatattaacggcgtgttttacgctactgaagaccaggaacacgtggtcagcggattacagggtattctgcgtggcgaatgctatttttcacaaaaattagccagttacctgattacgcactcaggaaattaccgctacaacagcaccgagtccgcattactcactcatcgcgaaaaagagatcctcaataagttacgtattggtgcctctaataatgaaatcgcgaggtcgctatttatcagcgagaatacggttaagacacatctttataatcttttcaaaaagatagctgtcaaaaatcgcacccaggcagtttcatgggcaaacgataatctcaggcggtaa

SEQ ID NO: 336 - DNA, 558 bp, Salmonella typhimurium
  rck (resistance to complement killing)
atgaaaaaaatcgttctgtcctcactgctgctgtccgcagccgggctggctgccgtaccggtggcacaggctgacacccattccgtgtcggtgggatatgcccagagccggatagagcattttaaggatatccgtggggtgaacctgaaataccgctatgaggctcagacgccgctgggactgatggcgtcgttcagttggcagtcaggtaagcgcggagagtccggtggcattcctggcggaatgagctggcgtgatgatgtgaaggcgacgtactggtcgctgatggcgggtccggctgtccgtgtgaacgagctggtatctctgtatgcactggccggtgccggtaccggcagggctgaagtgaaagagcgtatcagcatgccgggatacaacgggcggttcacgggttcggagcgcagaacggggtttgcctggggagccggcgtacagtttaatccggtggaaaatgtggtcatcgatctgggctatgagggaagtaaagttggcgcagcgaaactgaacggcgttaacgttggtgtcggttaccggttctga

SEQ ID NO: 337 - DNA, 4369 bp, Salmonella typhimurium
  pagP
gaattccagcacggcggccagcagcatacagatcaccagaatggtaataatgtgcaactgcggcccccatttaccgtcaaaaatcagtacgccgataatgggcgtgaacggcaaaagggcataaaacgccggggccgtggtggtaatctccgccacgtccagcatctcatgtgaaatgttctcttttttatccagatagcgttgccagaaaaagtgcgcaatcgccataccgataatggcggcgatggaaattggcagcgtagttttgaacgcgaaatcgattaacggcatctccgccgcttttgcggctaaaaccacatcgccagacgttggcgagaggatgatggcggccggagaggcgcaaatagccgccgccgcgccgcggctaatgccgacgttgaccatcaccgggaagagagtagccatgagcagtacgccaagccccgtcgcggaagagacggccagcgacatcaggcaggcgacaaaataggcggcaatcatcaacaggtagggcgagtttatgtactgtaaaggtttcgacgccagcttcacgaccatatcattcgcgccgatatgcgtcatataggcggcaaagccgcacagcatcatgatcatcatgccaagatcgccgccgcgactcataagcaaaattttgatgtattcaacaatatctgttgcggtatagccggtactggtttcgctggcaggtaataccttatgccccatcagcgcgctgataataagcagagccagaccgccgacaaataaaacgccagtggcggaatatcccttaatgatgtagcgcgctacacccacaataacgacgattccgataaggacctctataactgttagcattgtttcccctgtcttatcgacacccagagtaaaaataagaaccacaaaagtggtataaaaatgtaccgaataaaggatggcgccttactgattaaaatcacggcgcggttattttttcatgtcattgctaaagatgaaatatacttatacgaattttctgtagcactataagtattaatttattgttattttattgttttatttgttgtgctttgttttgtgttttttgtgaaagcttattaaggagcgcgtgacggttctgagtgctaaatcaaacgccgttaacccgatactctctcagattattctctgtttatagtttgttaagattttattcaggttaatgttgttattatcacagtcgaatttttgaacggtatgtatgttgcgatgatcatcagaaagtattttcttattattgctctccttttgatgccatggctggctattccttcagtctctgcggcggataaaggggggtttaacacgtttaccgataacgtcgcagaaacgtggcgacagcctgagcattatgatttgtatgtccccgccattacctggcatgcgcgctttgcctacgataaagagaaaacggatcgctataacgagcggccgtggggcgttggttttggtcagtcccgctgggacgacaaaggcaactggcatggcctctatatgatggcctttaaagattcatttaacaaatgggaacccataggcggttatggctgggaaaaaacctggcgaccgctggaagacgataattttcgccttggactgggctttaccgcaggcgttaccgcgcgcgacaactggaattatattcccatccctgtgctgttgcctttagcgtcgataggctatggtcccgctacctttcagatgacctacattccgggttcgtataacaacggaaacgtctatttcgcctggatgcgtttccagttttgatggggaagggtatgcttcagttgtgaattaaaaagtcttaaaaaacaataagtagatagagttagctaaaaattaacgcgatatttatcactttttcgcaaagttcgactggacaaaatgcatcacaattgttgtactggtatccgacacagcatttgtgtctatttttcatgtaaaggtaattttgatgtctaagattaaaggtaacgttaagtggtttaatgaatccaaaggattcggtttcattactccggaagatggcagcaaagacgtgtttgtacacttctctgcaatccagaccaatggttttaaaactctggctgaaggtcagcgcgtagagttcgaaatcactaacggtgccaaaggcccttccgctgcaaacgtaactgctctgtaagcatacgtccgacagcaagatttcaaaacccgccctttcggcgggttttttttgcgcttaacgcgccgctgcggcggaaaatagccagaatgccagcgccgtcatggcaaacgaacctaacaggttaatcagcacattcagcagcgcccagccaaagcgcccctcttgcagcaagaataccacttcggcagaaaaagtagaaaaggtcgtcaggccgccgcaaaagccggttgtgatgagcactttccacatcggatcgatatgtgtcatgcggttaaaccaggcgaaccccatgccgataataaacgcgccaagcaaatttgctgttagcgtaccgatgggaatcgcctgatgaagcggattaaaacgcatactgagcatccaccgggctacgctccccgttccaccgccgataaaaactgctaaaagaagctgtaacactgccgaatcctttatttaattgctatacaagaggagtgtaacgccgaacacgcataattggcgagtcctgacagaggtgtgggaggggatatgttcgttgcagccgggcagtttgtggtgagttctgtatgggaagagaatgcgcaagtttgcgtttcgttaatggctcaggcggcgggccgcggcgtatcgcttctggtgttgcctgaggggatattagcgcgagatgacatcgaccttgacctgccgattcgcgccgcgcagccgctggatggcgcgtttatgacgcggcttctggaagaaagcgctcataataatatgacgacgatattcactatccttgtcccgtcaacgcctggacgggcggttaatatgctggtggcgctacgggcgggtcacattgtcgcgcgttacgcgaagctgcatctctatgatgcgttttcgatgcaagaatcccaaagtattgatgccggaaccgttatcgcgcctgtgctggacgtggagggggttaaggtggggcttatgacctgttatgacctgcgctttccggacatggcgctagcgctggctttacagggggctgacgtattggcgctgccgacgggctgggttcgcggcccgttgaaagagcagcagtggtcgacgctgctggcggcgagagcgctggataccaccagctatatgattgcggccggggagtgtggtaatcgtaatattggtcaaagtcgtattatcgatccgttgggggtaacgatagccgcggcagccgatcgtccggcgctgatcgtcgcggaaatattcagagaacgaatagaccaggtgcgggagcaacttcctcttttgcagcaacgacgatttgcgccaccgcaattattatgatgtttttttacgcaaagcttgattcaccttgttacagattgctattgtgtgcgcgcgtcgaaagaccgttaatattctcaggttaatccggcgcgttacgcagcctgtttttagtgaagaaggtatctatgggtgagattagtattaccaaactgctggtggttgccgcactggttgttctgctgtttggtaccaagaagttacgtacgctgggcggagacctgggcacggcgattaaaggattcaagaaagcaatgaacgatgaagacgcgggcgttaagaaagacgtcgacggtagcgttcaggctgaaaaactctcgcacaaagagtaattgcgcgatgcgcttgctccgcagagtaaaaaaaccggcgagttgccggttttttttgcctgaaatgtaagcgtctattacacgatcatttcacttccatgcctttggcctggagatcagcatggtacgaagaacgtacaaaggggccacaggcggcatgggtaaagcccatcgccagggcttccgctttcatctcgtcaaactcttccgggctgacataacgctgtaccggcaggtgatggcggcttggctgtagatactgaccaagcgtcagcatggtaacgccgtgacggcgtaagtcgcgcataacctcaatgatttccgcattggtttcgcctaagcccaccatcagacccgattttgtcggaatttccgggtgcgcttctttgaagcgttccagtaatttcagcgaccagttgtaatcggcgcccggacgaacctggcggtaaatacgcggcacgttttccaggttgtggttaaacacatccggcggcgtcgcgttaaggatatc

SEQ ID NO: 338 - DNA, 1500 bp, Salmonella typhimurium
  fliC
aaggaaaagatcatggcacaagtcattaatacaaacagcctgtcgctgttgacccagaataacctgaacaaatcccagtccgctctgggcaccgctatcgagcgtctgtcttccggtctgcgtatcaacagcgcgaaagacgatgcggcaggtcaggcgattgctaaccgttttaccgcgaacatcaaaggtctgactcaggcttcccgtaacgctaacgacggtatctccattgcgcagaccactgaaggcgcgctgaacgaaatcaacaacaacctgcagcgtgtgcgtgaactggcggttcagtctgctaacagcaccaactcccagtctgacctcgactccatccaggctgaaatcacccagcgcctgaacgaaatcgaccgtgtatccggccagactcagttcaacggcgtgaaagtcctggcgcaggacaacaccctgaccatccaggttggtgccaacgacggtgaaactatcgatatcgatctgaagcagatcaactctcagaccctgggtctggatacgctgaatgtgcaacaaaaatataaggtcagcgatacggctgcaactgttacaggatatgccgatactacgattgctttagacaatagtacttttaaagcctcggctactggtcttggtggtactgaccagaaaattgatggcgatttaaaatttgatgatacgactggaaaatattacgccaaagttaccgttacggggggaactggtaaagatggctattatgaagtttccgttgataagacgaacggtgaggtgactcttgctggcggtgcgacttccccgcttacaggtggactacctgcgacagcaactgaggatgtgaaaaatgtacaagttgcaaatgctgatttgacagaggctaaagccgcattgacagcagcaggtgttaccggcacagcatctgttgttaagatgtcttatactgataataacggtaaaactattgatggtggtttagcagttaaggtaggcgatgattactattctgcaactcaaaataaagatggttccataagtattaatactacgaaatacactgcagatgacggtacatccaaaactgcactaaacaaactgggtggcgcagacggcaaaaccgaagttgtttctattggtggtaaaacttacgctgcaagtaaagccgaaggtcacaactttaaagcacagcctgatctggcggaagcggctgctacaaccaccgaaaacccgctgcagaaaattgatgctgctttggcacaggttgacacgttacgttctgacctgggtgcggtacagaaccgtttcaactccgctattaccaacctgggcaacaccgtaaacaacctgacttctgcccgtagccgtatcgaagattccgactacgcgaccgaagtttccaacatgtctcgcgcgcagattctgcagcaggccggtacctccgttctggcgcaggcgaaccaggttccgcaaaacgtcctctctttactgcgttaa

SEQ ID NO: 339 - DNA, 1528 bp, Salmonella typhimurium
  fljB
aaattttatggcacaagtaatcaacactaacagtctgtcgctgctgacccagaataacctgaacaaatcccagtccgcactgggcaccgctatcgagcgtctgtcttctggtctgcgtatcaacagcgcgaaagacgatgcggcaggtcaggcgattgctaaccgtttcaccgcgaacatcaaaggtctgactcaggcttcccgtaacgctaacgacggtatctccattgcgcagaccactgaaggcgcgctgaacgaaatcaacaacaacctgcagcgtgtgcgtgaactggcggttcagtctgctaacagcaccaactcccagtctgacctcgactccatccaggctgaaatcacccagcgcctgaacgaaatcgaccgtgtatccggccagactcagttcaacggcgtgaaagtcctggcgcaggacaacaccctgaccatccaggttggcgccaacgacggtgaaactatcgatatcgatctgaagcagatcaactctcagaccctgggtctggactcactgaacgtgcagaaagcgtatgatgtgaaagatacagcagtaacaacgaaagcttatgccaataatggtactacactggatgtatcgggtcttgatgatgcagctattaaagcggctacgggtggtacgaatggtacggcttctgtaaccggtggtgcggttaaatttgacgcagataataacaagtactttgttactattggtggctttactggtgctgatgccgccaaaaatggcgattatgaagttaacgttgctactgacggtacagtaacccttgcggctggcgcaactaaaaccacaatgcctgctggtgcgacaactaaaacagaagtacaggagttaaaagatacaccggcagttgtttcagcagatgctaaaaatgccttaattgctggcggcgttgacgctaccgatgctaatggcgctgagttggtcaaaatgtcttataccgataaaaatggtaagacaattgaaggcggttatgcgcttaaagctggcgataagtattacgccgcagattacgatgaagcgacaggagcaattaaagctaaaactacaagttatactgctgctgacggcactaccaaaacagcggctaaccaactgggtggcgtagacggtaaaaccgaagtcgttactatcgacggtaaaacctacaatgccagcaaagccgctggtcatgatttcaaagcacaaccagagctggcggaagcagccgctaaaaccaccgaaaacccgctgcagaaaattgatgccgcgctggcgcaggtggatgcgctgcgctctgatctgggtgcggtacaaaaccgtttcaactctgctatcaccaacctgggcaataccgtaaacaatctgtctgaagcgcgtagccgtatcgaagattccgactacgcgaccgaagtttccaacatgtctcgcgcgcagattctgcagcaggccggtacttccgttctggcgcaggctaaccaggtcccgcagaacgtgctgtctctgttacgttaa

SEQ ID NO: 340 - DNA, 537 bp, Yersinia enterocolitica
  ail (attachment invasion locus)
atgaaaaagacattactagctagttctctaatagcctgtttatcaattgcgtctgttaatgtgtacgctgcgagtgaaagtagtatttctattggttatgcgcaaagccatgtaaaagaaaatggggatacattggataatgaccctaaaggttttaacctgaagtaccgttatgaactcgatgataactggggagtaataggttcgtttgcttatactcatcagggatatgatttcttctatggcagtaataagtttggtcatggtgatgttgattactattcagtaacaatggggccatctttccgcatcaacgaatatgttagcctttatggattactgggggccgctcatggaaaggttaaggcatctgtatttgatgaatcaatcagtgcaagtaagacgtcaatggcatacggggcaggggtgcaattcaacccacttccaaattttgtcattgacgcttcatatgaatactccaaactcgatagcacaaaagttggcacctggatgcttggtgcagggtatcgattctaa

SEQ ID NO: 341 - DNA, 1286 bp, Salmonella typhimurium
  pgtE (outer membrane serine protease)
tgattatagattgcttattattcacctgagcatcaaattctatttcttaacttcaatataaggtaaaaatgcgtcaagttctctggcgtaataaatgtactcttgtccgacgatttgacaagatgaaaacttcatcacctctccagattacatctgaatatgaggacaagagaaatgaaaaaacatgctattgcagtaatgatgatcgccgtattttctgagtcggtttatgcggagtctgccttatttattccggacgtctctcctgatagcgtcacgacatccctttccgtgggtgtgttaaatggtaaatccagggagctggtttatgataccgacaccgggcggaagctgagtcaactggattggaaaataaaaaatgtcgccacgttgcagggggatttatcatgggaaccctattcgttcatgacgctggacgcccgcggctggacgtctttggcgtcgggatcgggtcatatggttgaccatgactggatgagcagtgagcagccaggctggaccgatcgttcaattcatccggacaccagcgtcaactatgctaatgaatacgatttgaacgtgaaaggttggttattgcagggcgataactacaaggcgggcgtaacagcgggctatcaggaaacccgttttagctggacggcaagaggcgggtcttatatttatgataatggtcgatatattggtaattttcctcatggcgtgcgcggcataggttatagccagcgtttcgaaatgccctatatcgggctggcgggtgattatcgtattaatgactttgagtgtaatgtactgtttaaatacagcgactgggtaaatgcgcatgataatgacgaacactacatgcgcaaacttaccttccgtgaaaaaacggaaaattcacgatattatggcgcttctattgacgccggatattatattaccagtaatgcaaaaatctttgctgagtttgcttacagtaaatatgaagaaggtaagggcggtacgcaaatcatagataaaaccagcggtgatacggcgtattttggtggcgatgccgcaggtatagctaataataactatacggttaccgcggggttgcagtatcgcttctagaccacatcgggatgtcatcggtcataaccggccgatgacgactttttgctgaacgtatggcatgtccggtgatattgcataggggcaataaaagcaacatgaaagggaaaccgctcgaaaggttatgcagcaagaagagaatgtcctgggtatcaatggtgtcccctgcagta

SEQ ID NO: 342 - protein, 254 aa, Homo sapiens
  4-1BBL
MEYASDASLDPEAPWPPAPRARACRVLPWALVAGLLLLLLLAAACAVFLACPWAVSGARASPGSAASPRLREGPELSPDDPAGLLDLRQGMFAQLVAQNVLLIDGPLSWYSDPGLAGVSLTGGLSYKEDTKELVVAKAGVYYVFFQLELRRVVAGEGSGSVSLALHLQPLRSAAGAAALALTVDLPPASSEARNSAFGFQGRLLHLSAGQRLGVHLHTEARARHAWQLTQGATVLGLFRVTPEIPAGLPSPRSE

SEQ ID NO: 343 - DNA, 4899 bp, Homo sapiens
  4-1BBL
agtctctcgtcatggaatacgcctctgacgcttcactggaccccgaagccccgtggcctcccgcgccccgcgctcgcgcctgccgcgtactgccttgggccctggtcgcggggctgctgctgctgctgctgctcgctgccgcctgcgccgtcttcctcgcctgcccctgggccgtgtccggggctcgcgcctcgcccggctccgcggccagcccgagactccgcgagggtcccgagctttcgcccgacgatcccgccggcctcttggacctgcggcaggtgagacgtgccccgaccctcggtagctggtctcgcgggagacccctaccgcccctctgggactcccttctccctcccgcacccccagggacacctgttctacactcccggccggggagaggagacccaccggggctcccattctccatctagcaccgaggccgggggggcacacctttcatcccgcacccctacgacacctcatctgtaccccaggccgggggcggggaggagaccgcccaacagttctttttggaccccccaagggtctccttcttctagtccggggggcacccctttcatcctgcgcccgctacgagaccctatctgtatcccgggagggggagaggagacccccacaagttctttttggacctccaagggctctccttctccgtcttgcacgggagggcacccctttcattccgcatcccgagaccccatcagcaccccaggccaggaggaggagacccccacagtcctcaacccctcagggatacgtcttctgcaccccgggtcggagaaaggctggcttccctccatgtggcagtgggtgggggcacccctcttcattccgcattcccaaggcaccccatctgcaccctggacgggggaccctccgcggttctccaaccctcgacggcttcctttctctatgtaggacttaggacattgagggcacctctttttaccccgcacccccacaagctctgcatctctggggggaaccttttttccatccccgatccgaggggggcacttcctctttatctgggaccgccaaggagacccccagttcctttgctaactcccaaagagccttatccccaacatctgaggtacccctctccctttcaagacccccaggggaatacccccaagggggctggaaagaagagggatcgcttttccctcctgaattcttggagatctgtccttggggcaggttgagccaccagcttcgtgtgtgtgtgtgtgtgtgtgtgtgtgtgtgttcgtgtttgtgtgggtgtttgtgttcgtgtgtgtgtgttcgtgtgggggtgcgtatgtgtgtgtgttcgtgggtgtgtttgtgttcgtgtgggtgtgtgttcgtgtgggtgtttgtgtttgttcgttcgtgtgggtgtttgtgttcatgtgggtgtgtttggatatttgtgttcgtgtgtgtctgtgtgtgttcgtgtgggtgtttgtgtgtgtttgtgtttgcgttcgtgtgtgtgttcgtgtttgttcgtgtgtctgtgtgttaatgtgggtgttcgtgtgtgtgttcgtttgtgtttgtgttcgtgtgtttgtgtgtttgtgtgtgtgtgtgtgcggtctctgttctttagttgggagggaagggaagcgtaggcttcaggtcggcacagactctggggaccctgacagctgaagtgagtggggacagaacctccattttctaggggaacccccatccactttcctcctttctacttttaacagggcatgtttgcgcagctggtggcccaaaatggtaagtatcctccgccacttccggtccctggccccccaccatccccaccccgggatacgaagaagggggaacctggagagtgaggctctgccgcacactggctttgacccttgaccgctgctgtctctgaaagctgctacttcccctctttgaacgccaccgatccctctttctgacttgctctgactctctggatgccatggcctccccatcagacccccatctgggcccacctgggacccctgccctctcagagctggggcttgacacccccaacccccagcctggttttgtgtctctggcctccttcttttcgaaaccctcttccccgctgcttttcttccctctttcctgccccttccccactctcccagcctctcttccctacctcttcccctcgcccagagcctcctccttactcccattctcttccccatccccaggccctcctcctgtccccttccctccccctagaccctcctccctgccccttccccaaaccctccccagccccatgctctcccagtttccaagacactcctcccagcaccttccctccccgtccagagacttcttccccgctcgagacctcttcccccttcccctcccagagacccccttcccccttcccctctccatctagagatcacttccccctttcccctccccctccagaaaccccttcccccttccctctcccctccagagaccccttccccctccaaagaccccttcccccttccttccccctccagagacccctttccccttccctccccttccagagaccccttccccctccccctccaaagaccccttcctccttcccctccctctccagagaccccttcccccttccctctccctccagagaccccttcccccttccctgccccctccagagtccccttcccctccagaggccccttcccccttccccctccccctccagagacaccttctcccttctccccctccagagaccccttcccccttccctccccctgcctaagactcccctccctgccatcttctctccttggtgcttccttctccctaacccctcccccaccccttcctgctccctttgcctttcttcgaagtcctctcttaccaggtcccctgtccacccctcttaaagttcccttgattccctgatggatccttcctctagaacttcctcctttcctaacagtcttccctctccctcctagctccctgtccacctctcctctcccctttccttccttctctcccttctcctccccccatctccatcctgtccgagatctgctgctccctccaaccccctcaccgccctctccaggagtccccttacccctccccgaggcctcttccagccagactcgcctggccttttgcttttcaccccctcttcctcttcctgcatgtctttccccgcacccgcatcactccttccccacccaacctcttggagttttgccctgtcccgactcttgtccttctccctggattcccttcctctgttctatccccgtctttccctcccctagctctacccctgctcagagtcccgcccccaacaacctcagttctcttcaatcagcacccccccaacgccccccccacccaggctccccgctctgctcccctgtcccgctccctgccccgccattccccgccccccggcccctgacccgttcttttctcccagggctgcgctgacatgttcggtgctcagccacgctcagctgtgctgggacatgctcagctaagctaagtgcatgctttcctcccacagttctgctgatcgatgggcccctgagctggtacagtgacccaggcctggcaggcgtgtccctgacggggggcctgagctacaaagaggacacgaaggagctggtggtggccaaggctggagtctactatgtcttctttcaactagagctgcggcgcgtggtggccggcgagggctcaggctccgtttcacttgcgctgcacctgcagccactgcgctctgctgctggggccgccgccctggctttgaccgtggacctgccacccgcctcctccgaggctcggaactcggccttcggtttccagggccgcttgctgcacctgagtgccggccagcgcctgggcgtccatcttcacactgaggccagggcacgccatgcctggcagcttacccagggcgccacagtcttgggactcttccgggtgacccccgaaatcccagccggactcccttcaccgaggtcggaataacgtccagcctgggtgcagcccacctggacagagtccgaatcctactccatccttcatggagacccctggtgctgggtccctgctgctttctctacctcaaggggcttggcaggggtccctgctgctgacctccccttgaggaccctcctcacccactccttccccaagttggaccttgatatttattctgagcctgagctcagataatatattatatatattatatatatatatatatttctatttaaagaggatcctgagtttgtgaatggacttttttagaggagttgttttgggggggggggggtcttcgacattgccgaggctggtcttgaactcctggacttagacgatcctcctgcctcagcctcccaagcaactgggattcatcctttctattaattcattgtacttatttgcttatttgtgtgtattgagcatctgtaatgtgccagcattgtgcccaggctagggggctatagaaacatctagaaatagactgaaagaaaatctgagttatggtaatacgtgaggaatttaaagactcatccccagcctccacctcctgtgtgatacttgggggctagcttttttctttctttcttttttttgagatggtcttgttctgtcaaccaggctagaatgcagcggtgcaatcatgagtcaatgcagcctccagcctcgacctcccgaggctcaggtgatcctcccatctcagcctctcgagtagctgggaccacagttgtgtgccaccacacttggctaactttttaatttttttgcggagacggtattgctatgttgccaaggttgtttacatgccagtacaatttataataaacactcatttttcctccc

SEQ ID NO: 344 - protein, 309 aa, Mus musculus
  4-1BBL
MDQHTLDVEDTADARHPAGTSCPSDAALLRDTGLLADAALLSDTVRPTNAALPTDAAYPAVNVRDREAAWPPALNFCSRHPKLYGLVALVLLLLIAACVPIFTRTEPRPALTITTSPNLGTRENNADQVTPVSHIGCPNTTQQGSPVFAKLLAKNQASLCNTTLNWHSQDGAGSSYLSQGLRYEEDKKELVVDSPGLYYVFLELKLSPTFTNTGHKVQGWVSLVLQAKPQVDDFDNLALTVELFPCSMENKLVDRSWSQLLLLKAGHRLSVGLRAYLHGAQDAYRDWELSYPNTTSFGLFLVKPDNPWE

SEQ ID NO: 345 - DNA, 2472 bp, Mus musculus
  4-1BBL
gagaaagttccgggagtcgaggggcggagcgcggagcccgggaaccccgcggctgccctccctcccttccctccccggaaaaggcgcctcggtagcctataaagcacgggcactggcgggagacgtgcactgaccgaccgtggtaatggaccagcacacacttgatgtggaggataccgcggatgccagacatccagcaggtacttcgtgcccctcggatgcggcgctcctcagagataccgggctcctcgcggacgctgcgctcctctcagatactgtgcgccccacaaatgccgcgctccccacggatgctgcctaccctgcggttaatgttcgggatcgcgaggccgcgtggccgcctgcactgaacttctgttcccgccacccaaagctctatggcctagtcgctttggttttgctgcttctgatcgccgcctgtgttcctatcttcacccgcaccgagcctcggccagcgctcacaatcaccacctcgcccaacctgggtacccgagagaataatgcagaccaggtcacccctgtttcccacattggctgccccaacactacacaacaggtgaggctcatctcatccctaggggactctttcttaccttctggaagcatcgctgcaccgacagggagagaacagcacttcctccccacccccgccccgccccgccccgccccgcctcgctctgctcctgctactccgcttgaagcaccccctctccatctcgcactcagaggaaatccctttgcgtcttgaccccttgaatgaacctatgaaacctgggggagaactcccgagggtgcaccgcagttcccttcagtcccacttaggccttcagggctctccttctccatccaaagttggacgccccaatgtgtgctgggccgtatgagttcctatctgcttctttaggatgtaaggtaccatctacctttatttttctttcttcccagggctctcctgtgttcgccaagctactggctaaaaaccgtgagtgccccctgatttatttccagcgggtcccgcagggaggttgaacaaggggacctgttcaaccttctagtcatgtccctctccctcacttactcagcctttctcacttgctgtcacagctccaactgtcatccttgggaccccatccaggttttcagagaattgagaattctcacccccagctgactctgggagatctccttttctcttttccttcctctatccctcccatgtagcccaggcttcctccaaattcattatgtagctgaggctggccgccctgctgccaacacctccaatgggctgggataaatgaatgcctttgggcttcaggcaccctattgagcccgagccctagtctctccctgtcaagtcttagttgtcaaattatttgccctcagagatgactctcttcctgcactctccatatcccacctctctcccagttttgttcatccctctcttactcctctgatttctctctcttcttttctcctctcccccttcccctcttgtggcccctttactcagctccttccaggagtccatgtgcatctccgctcttaacactctagaccctcgcccctttgcctcgttcttattccacaaccactttcttaaattgtatcccttctgggtggcccctccctccttttcttctgttttgtctcctctctttcctccccattcccatggtttcccccctcccccacaccccgcaaccctcagcaactcagtgttctttttctagaagcatcgttgtgcaatacaactctgaactggcacagccaagatggagctgggagctcatacctatctcaaggtctgaggtacgaagaagacaaaaaggagttggtggtagacagtcccgggctctactacgtatttttggaactgaagctcagtccaacattcacaaacacaggccacaaggtgcagggctgggtctctcttgttttgcaagcaaagcctcaggtagatgactttgacaacttggccctgacagtggaactgttcccttgctccatggagaacaagttagtggaccgttcctggagtcaactgttgctcctgaaggctggccaccgcctcagtgtgggtctgagggcttatctgcatggagcccaggatgcatacagagactgggagctgtcttatcccaacaccaccagctttggactctttcttgtgaaacccgacaacccatgggaatgagaactatccttcttgtgactcctagttgctaagtcctcaagctgctatgttttatggggtctgagcaggggtcccttccatgactttctcttgtctttaactggacttggtatttattctgagcatagctcagacaagactttatataattcactagatagcattagtaaactgctgggcagctgctagataaaaaaaaatttctaaatcaaagtttatatttatattaatatataaaaataaatgtgtttgta

SEQ ID NO: 346 - DNA, 589 bp, Artificial Sequence
  Woodchuck Hepatitis Virus Posttranscriptional Regulatory Element (WPRE)
aatcaacctctggattacaaaatttgtgaaagattgactggtattcttaactatgttgctccttttacgctatgtggatacgctgctttaatgcctttgtatcatgctattgcttcccgtatggctttcattttctcctccttgtataaatcctggttgctgtctctttatgaggagttgtggcccgttgtcaggcaacgtggcgtggtgtgcactgtgtttgctgacgcaacccccactggttggggcattgccaccacctgtcagctcctttccgggactttcgctttccccctccctattgccacggcggaactcatcgccgcctgccttgcccgctgctggacaggggctcggctgttgggcactgacaattccgtggtgttgtcggggaagctgacgtcctttccatggctgctcgcctgtgttgccacctggattctgcgcgggacgtccttctgctacgtcccttcggccctcaatccagcggaccttccttcccgcggcctgctgccggctctgcggcctcttccgcgtcttcgccttcgccctcagacgagtcggatctccctttgggccgcctccccgc

SEQ ID NO: 347 - DNA, 753 bp, Artificial Sequence
  Hepatitis B Virus Posttranscriptional Regulatory Element (HPRE)
atgcatgtattcaatctaagcaggctttcactttctcgccaacttacaaggcctttctgtgtaaacaatacctgaacctttaccccgttgcccggcaacggccacctctgtgccaagtgtttgctgacgcaacccccactggctggggcttggtcatgggccatcagcgcatgcgtggaaccttttcggctcctctgccgatccatactgcggaactcctagccgcttgttttgctcgcagcaggtctggagcaaacattatcgggactgataactctgttgtcctatcccgcaaatatacatcgtttccatggctgctaggctgtgctgccaactggatcctgcgcgggacgtcctttgtttacgtcccgtcggcgctgaatcctgcggacgacccttctcggggtcgcttgggactctctcgtccccttctccgtctgccgttccgaccgaccacggggcgcacctctctttacgcggactccccgtctgtgccttctcatctgccggaccgtgtgcacttcgcttcacctctgcacgtcgcatggagaccaccgtgaacgcccaccaaatattgcccaaggtcttacataagaggactcttggactctcagcaatgtcaacgaccgaccttgaggcatacttcaaagactgtttgtttaaagactgggaggagttgggggaggagattaggttaaaggtctttgtactaggaggctgtaggcataaattggtctgcgcaccagcaccatg

SEQ ID NO: 348 - protein, 398 aa, Danio rerio
  WT Zebrafish STING (zfSTING)
MSVMGEDALVPRARSRLPVMCAAGLGFLTLAVAWLLDSDKFSERAGIIAFGLMLERFIYCICLLAEELLFHSRQRYHGRMSEIFRACFRGSGILGMCAIFLMLMLGGVSFSVKQWSHFNLMCAGYMLLNSLGVLGPAPVEISEICEAKKMNVAHGLAWSFYIGYLKFLLPALEVNVREYSRRERLSSPRLHILLPLNARVPSKPEEEDTNVVFHENLPDLKLDRAGVRKRSYTNSVYKITHNNETFSCILEYATPLLTLYQMSQESSAGFGERERKQQVLLFYRTLSQILDNSLECRNRYRLILLNDEHTGDPHYLSRELFQNLKQQDGEIFMDPTNEVHPVPEEGPVGNCNGALQATFHEEPMSDEPTLMFSRPQSLRSEPVETTDYFNPSSAMKQN

SEQ ID NO: 349 - protein, 381 aa, Sarcophilus harrisii
  WT Tasmanian devil STING (tazSTING)
MPRSHLHPSIPQPRGWGAQKAACVLLSLCMAAVYILGESAAFTLQWLLFYFTTVQVGLLLKGAYCLAEELYHIQSRHQGSYWQAIQACIHYPFQRISLLLLSGYFYVTLSNKPNPSLTWTFALLGLSHALSFILGLQNLTSAEISEVCEKRHLNVAHGLAWSYYIGYLKLILPGLQTRIQIYNQFNKDVLRSPEGHRLHILIPLDCSVPDNLSQADPNIQFLQELPQHKLDRAGIKGRIYTNSIYKISEDGQPAEVCVLEFATPLQTLFAMSQDARAGFSREDRLEQAKLFCRTLEDILEDAPEARDCCRLVVYQEPEDKAVSNFSLSKEILRHLRQERQEEFAIGPKRAMTVTTSSTLSQEPQLLISGMEQPLSLRTDGF

SEQ ID NO: 350 - protein, 381 aa, Artificial Sequence
  Tasmanian devil STING (tazSTING) C206Y
MPRSHLHPSIPQPRGWGAQKAACVLLSLCMAAVYILGESAAFTLQWLLFYFTTVQVGLLLKGAYCLAEELYHIQSRHQGSYWQAIQACIHYPFQRISLLLLSGYFYVTLSNKPNPSLTWTFALLGLSHALSFILGLQNLTSAEISEVCEKRHLNVAHGLAWSYYIGYLKLILPGLQTRIQIYNQFNKDVLRSPEGHRLHILIPLDYSVPDNLSQADPNIQFLQELPQHKLDRAGIKGRIYTNSIYKISEDGQPAEVCVLEFATPLQTLFAMSQDARAGFSREDRLEQAKLFCRTLEDILEDAPEARDCCRLVVYQEPEDKAVSNFSLSKEILRHLRQERQEEFAIGPKRAMTVTTSSTLSQEPQLLISGMEQPLSLRTDGF

SEQ ID NO: 351 - protein, 381 aa, Artificial Sequence
  Tasmanian devil STING (tazSTING) R284G
MPRSHLHPSIPQPRGWGAQKAACVLLSLCMAAVYILGESAAFTLQWLLFYFTTVQVGLLLKGAYCLAEELYHIQSRHQGSYWQAIQACIHYPFQRISLLLLSGYFYVTLSNKPNPSLTWTFALLGLSHALSFILGLQNLTSAEISEVCEKRHLNVAHGLAWSYYIGYLKLILPGLQTRIQIYNQFNKDVLRSPEGHRLHILIPLDCSVPDNLSQADPNIQFLQELPQHKLDRAGIKGRIYTNSIYKISEDGQPAEVCVLEFATPLQTLFAMSQDARAGFSREDGLEQAKLFCRTLEDILEDAPEARDCCRLVVYQEPEDKAVSNFSLSKEILRHLRQERQEEFAIGPKRAMTVTTSSTLSQEPQLLISGMEQPLSLRTDGF

SEQ ID NO: 352 - protein, 379 aa, Artificial Sequence
  WT human STING-tasmanian devil CTT
MPHSSLHPSIPCPRGHGAQKAALVLLSACLVTLWGLGEPPEHTLRYLVLHLASLQLGLLLNGVCSLAEELRHIHSRYRGSYWRTVRACLGCPLRRGALLLLSIYFYYSLPNAVGPPFTWMLALLGLSQALNILLGLKGLAPAEISAVCEKGNFNVAHGLAWSYYIGYLRLILPELQARIRTYNQHYNNLLRGAVSQRLYILLPLDCGVPDNLSMADPNIRFLDKLPQQTGDRAGIKDRVYSNSIYELLENGQRAGTCVLEYATPLQTLFAMSQYSQAGFSREDRLEQAKLFCRTLEDILADAPESQNNCRLIAYQEPADDSSFSLSQEVLRHLRQERQEEFAIGPKRAMTVTTSSTLSQEPQLLISGMEQPLSLRTDGF

SEQ ID NO: 353 - protein, 379 aa, Artificial Sequence
  human STING C206Y-tasmanian devil CTT
MPHSSLHPSIPCPRGHGAQKAALVLLSACLVTLWGLGEPPEHTLRYLVLHLASLQLGLLLNGVCSLAEELRHIHSRYRGSYWRTVRACLGCPLRRGALLLLSIYFYYSLPNAVGPPFTWMLALLGLSQALNILLGLKGLAPAEISAVCEKGNFNVAHGLAWSYYIGYLRLILPELQARIRTYNQHYNNLLRGAVSQRLYILLPLDYGVPDNLSMADPNIRFLDKLPQQTGDRAGIKDRVYSNSIYELLENGQRAGTCVLEYATPLQTLFAMSQYSQAGFSREDRLEQAKLFCRTLEDILADAPESQNNCRLIAYQEPADDSSFSLSQEVLRHLRQERQEEFAIGPKRAMTVTTSSTLSQEPQLLISGMEQPLSLRTDGF

SEQ ID NO: 354 - protein, 379 aa, Artificial Sequence
  human STING R284G-tasmanian devil CTT
MPHSSLHPSIPCPRGHGAQKAALVLLSACLVTLWGLGEPPEHTLRYLVLHLASLQLGLLLNGVCSLAEELRHIHSRYRGSYWRTVRACLGCPLRRGALLLLSIYFYYSLPNAVGPPFTWMLALLGLSQALNILLGLKGLAPAEISAVCEKGNFNVAHGLAWSYYIGYLRLILPELQARIRTYNQHYNNLLRGAVSQRLYILLPLDCGVPDNLSMADPNIRFLDKLPQQTGDRAGIKDRVYSNSIYELLENGQRAGTCVLEYATPLQTLFAMSQYSQAGFSREDGLEQAKLFCRTLEDILADAPESQNNCRLIAYQEPADDSSFSLSQEVLRHLRQERQEEFAIGPKRAMTVTTSSTLSQEPQLLISGMEQPLSLRTDGF

SEQ ID NO: 355 - protein, 376 aa, Artificial Sequence
  WT human STING delTRAF6 binding motif (Asp-Phe-Ser at C-terminal removed)
MPHSSLHPSIPCPRGHGAQKAALVLLSACLVTLWGLGEPPEHTLRYLVLHLASLQLGLLLNGVCSLAEELRHIHSRYRGSYWRTVRACLGCPLRRGALLLLSIYFYYSLPNAVGPPFTWMLALLGLSQALNILLGLKGLAPAEISAVCEKGNFNVAHGLAWSYYIGYLRLILPELQARIRTYNQHYNNLLRGAVSQRLYILLPLDCGVPDNLSMADPNIRFLDKLPQQTGDRAGIKDRVYSNSIYELLENGQRAGTCVLEYATPLQTLFAMSQYSQAGFSREDRLEQAKLFCRTLEDILADAPESQNNCRLIAYQEPADDSSFSLSQEVLRHLRQEEKEEVTVGSLKTSAVPSTSTMSQEPELLISGMEKPLPLRT

SEQ ID NO: 356 - protein, 377 aa, Felis catus
  WT cat STING (catSTING)
MPRTGLHPSIPRPRGMGAQKAALVLLAVCLAALWRLGESPDHTLRWLVLHLASLQLGLLFTGVCHLTEELCHLHSRYQGSYWRAMKACLGSPVRSGALLLLSCYFYSTLPSTDLPFTWMLALLGLSQALNILLDLQGLAPAEVSAVCEKKNFNVAHGLAWSYYIGYLRLILPGLPARVLTCNQLHNNILRGTGSHRLHILFPLDCGVPDDMSVADPNIRFLYELPQQSADRAGIKGRVYTNSVYALLENGQQAGICVLEYATPLQTLFAMSQDGRAGFSREDRLEQAKLFCRILEDILADTPECQNNCRLIVYQEPEEGSNFSLSQEILRHLRQEEREVTVGSVGTSMVRNPSVLSQEPNLLISGMEQPLPLRTDVF

SEQ ID NO: 357 - protein, 377 aa, Artificial Sequence
  cat STING C205Y
MPRTGLHPSIPRPRGMGAQKAALVLLAVCLAALWRLGESPDHTLRWLVLHLASLQLGLLFTGVCHLTEELCHLHSRYQGSYWRAMKACLGSPVRSGALLLLSCYFYSTLPSTDLPFTWMLALLGLSQALNILLDLQGLAPAEVSAVCEKKNFNVAHGLAWSYYIGYLRLILPGLPARVLTCNQLHNNILRGTGSHRLHILFPLDYGVPDDMSVADPNIRFLYELPQQSADRAGIKGRVYTNSVYALLENGQQAGICVLEYATPLQTLFAMSQDGRAGFSREDRLEQAKLFCRILEDILADTPECQNNCRLIVYQEPEEGSNFSLSQEILRHLRQEEREVTVGSVGTSMVRNPSVLSQEPNLLISGMEQPLPLRTDVF

SEQ ID NO: 358 - protein, 377 aa, Artificial Sequence
  cat STING R283G
MPRTGLHPSIPRPRGMGAQKAALVLLAVCLAALWRLGESPDHTLRWLVLHLASLQLGLLFTGVCHLTEELCHLHSRYQGSYWRAMKACLGSPVRSGALLLLSCYFYSTLPSTDLPFTWMLALLGLSQALNILLDLQGLAPAEVSAVCEKKNFNVAHGLAWSYYIGYLRLILPGLPARVLTCNQLHNNILRGTGSHRLHILFPLDCGVPDDMSVADPNIRFLYELPQQSADRAGIKGRVYTNSVYALLENGQQAGICVLEYATPLQTLFAMSQDGRAGFSREDGLEQAKLFCRILEDILADTPECQNNCRLIVYQEPEEGSNFSLSQEILRHLRQEEREVTVGSVGTSMVRNPSVLSQEPNLLISGMEQPLPLRTDVF

SEQ ID NO: 359 - protein, 377 aa, Callithrix jacchus
  WT Marmoset STING
MPHSSLHPSIPHPRGHGAQEAALVLLSVCLVTLWWLREAPEDILRFLVLHLASLQLGLLLNRLCSLAEELRHVHTRYQGSYWRAVRACLGCPIRLGAQLLLSIYFYCFLPNGRPFTWMLALLGFSQALNILLGLKGLAPAEISAVCEKRNFNVAHGLAWSYYIGYLRLILPGFQARIRTYNQHNNNVLRGPASQRLYILFPLDCGVPDNLSTADPNIRFLDKLPQETIDRAGIKGRVYTNSIYELLENGQRAGACVLEYASPLQTLFAMSQYGQAGFSREDRLEQAKLFCRTLEDILADAPESQNNCRLIVYEEPADGSSFLLSQEVLQHLRQEEEEEVTVGSLKTSEVPSTSTMSQEPELLISGMEKPLPLRSDLF

SEQ ID NO: 360 - protein, 378 aa, Bos taurus
  WT Cattle/Bovine STING
MPHSSLHPSIPQPRGLRAQKAALVLLSACLVALWGLGEPPDYTLKWLVLHLASQQMGLLIKGICSLAEELCHVHSRYHGSYWRAVRACLCSSMRCGALLLLSCYFYCSLPNMADLPFTWMLALLGLSQALNILLGLQGLAPAEVSAICEKRNFNVAHGLAWSYYIGYLRLILPGLPARIQIYNQFHNNTLQGAGSHRLHILFPLDCGVPDDLNVADPNIRFLHELPQQSADRAGIKGRVYTNSIYELLENGQRAGVCVLEYATPLQTLFAMSQDGRAGFSREDRLEQAKLFCRTLEDILANAPESQNNCRLIVYQEPAEGSSFSLSQEILQHLRQEEREVTMGSTETSVMPGSSVLSQEPELLISGLEKPLPLRSDVF

SEQ ID NO: 361 - protein, 375 aa, Struthio camelus australis
  WT Ostrich STING
MAHESGTPSNPATPLIPKAREGRAQHAAYVLLALCAAALYLAGEPVVHIARSFTSHFVALQIGALLKGICYLVEEIFHLETRHRGSFRRALSACLHLRWHVTLLLVCGSAYVALLDGDEQPLGLHLGLACLCQLLILALGLHKPSAVEISEMSERSKQNVAHGLAWSYYVGYLKIVLPRLKESMENIGRTNPNMLAHKETWKLHILVPLSCNICDDLEKADSNIQYAMDLPETTLTRAGTKKRVYRNTLYKIKDEDKFRFCVVEYATPLQSLYAMSQDECAAFSREDRIEQAKLFYRTLEEILQSAKECAGTYRLIVYEESGEAETHFLSREILRHLQQQRQEEYTVCDGTLCSTDLSLQISESDLPQPLRSDCL

SEQ ID NO: 362 - protein, 382 aa, Nipponia nippon
  WT Crested ibis STING
MSQEPQWLSHPTALLIPKARGGRAQHAVYLLLALCAAVLYLAGEPLVPSARSLISHFMALQIGVLLKGTCYLAEEIFHLQSRHHGSFWRALSACFPLRWHGLMLLVCGSAYVALLEDGQPLGLHLGLASLCQLLILALGLHKPSAVEMSEMSERSKQNVAHGLAWSYYVGYLKIVLPRVKKSMEEFSRANPNVLARRETWKLHILVPLSCDVYDDLEKADSNIQYLMDLPETTLTRAGTKKRVYKHSLYTIRDEGNKLWHCAVEYATPLQSLYAMSQDEYAAFSREDRLEQAKLFYRTLEEILKGSKECAGTYRLIVYEESGEAETHSLSRDILWHLRQQCHEEYTVYEGNQPHNPSTTLHSTELNLQISESDLPQPLRSDC

SEQ ID NO: 363 - protein, 380 aa, Latimeria chalumnae
  WT Coelacanth STING (UniProtKB entry H3A3G4)
FGLQNMSAIIPQPRGNRANQMAYFIITVILMLLWIFRNIMDNVLEVIALHILLLQGAAIMKGICNFAEEVNHVQPRYGGSYWKALEACLNLSKYDVMKIVFAGVLWWHFSSSLFVVWFLHLLVSCLCHLLNNVLGVLKPSPVEVSEIYERNRIGVAHGLAWSYYLGYLKLVLPELEDRIKSYNVSHGNLLKHKETWRLHILLPLSCSIFDNLADVDSNIEFLDNLSELQINRAGIKGRSYKHSLYQVLDEDKRPHYCILEYATPLKSLLEMSKEASAEFTKEDRLEQTKLFYRTLKDILDNSQECRGRFRLVIYDGREDSGKSHFLSKELLRHLNQQQKEEYFMSEQTQPNSSSTSCLSTEPQLMISDTDAPHTLKRQVC

SEQ ID NO: 364 - protein, 405 aa, Latimeria chalumnae
  WT Coelacanth STING (Isoform X1; NCBI Accession No. XP_005989369.1)
MCFIQVLDITIITQMLQGEYFGLQNMSAIIPQPRGNRANQMAYFIITVILMLLWIFRNIMDNVLEVIALHILLLQGAAIMKGICNFAEEVNHVQPRYGGSYWKALEACLNLSKYDVMKIVFAGVLWWHFSSSLFVVWFLHLLVSCLCHLLNNVLGVLKPSPVEVSEIYERNRIGVAHGLAWSYYLGYLKLVLPELEDRIKSYNVSHGNLLKHKETWRLHILLPLSCSIFDNLADVDSNIEFLDNLSELQINRAGIKGRSYKHSLYQVLDEDKRPHYCILEYATPLKSLLEMSKEASAEFTKEDRLEQTKLFYRTLKDILDNSQECRGRFRLVIYDDCQDVLDGEDSGKSHFLSKELLRHLNQQQKEEYFMSEQTQPNSSSTSCLSTEPQLMISDTDAPHTLKSGF

SEQ ID NO: 365 - protein, 378 aa, Sus scrofa
  WT Boar STING
MPYSSLHPSIPQPRGLRAQVAALVLLGACLVALWGLGELPEYTLRWLVLHLASQQIGLLVKGLCSLAEELCHVHSRYQSSYWRAARACLGCPIRCGALLLLSCYFYFSIRDKAGLPLPWMLALLGLSQALNILLGLQHLAPAEVSAICEKRNFNVAHGLAWSYYIGYLRLILPGLRARIQAYNQRHKNVLGGIGNHRLHILFPLDCGVPDDLSVADPNIRFLHELPQQSADRAGIKGRVYTNSIYELLENGQPAGVCVLGYATPLQTLFAMSQDGRAGFSREDRLEQAKLFCRTLEDILADAPEAQNNCRLIVYQEPTEGGSFSLSQEILRHLRQEEREVTMGSAETSVVPTSSTLSQEPELLISGMEQPLPLRSDIF

SEQ ID NO: 366 - protein, 380 aa, Rousettus aegyptiacus
  WT Bat STING
MSHSSLHPSVPRPRGRRARNIAAFVLLIVCLAALWLSGKPSEYTLRCLVLHLASQQLGLLSNRVCYLAEELSHIHSRYQGNYWRAVRACLSCPIRFGVVLLVSFFFYTSLPNIDDLPLTWMLAHLGLSEALNILLGLRGLTPAEVSTVCEQRHFNVAHGLAWSYYIGYLRLILPGLRARIHTYNQLHGNTLQGVGSHRLYILFPLDCGVLDDLSAADPNIRFLRELPRQSSDRAGIKNRVYTNSVYELLEKGKPVGTCVLEYATPLQTLFAMSQDARAGFSQEDRLEQAKLFCRTLADILADDPESQKSCRLIVYQEPTEESDFSLSQAILKHLRQEEKEEVTVGTVGTYEAPGSSTLHQEPELLISGMDQPLPLRTDIF

SEQ ID NO: 367 - protein, 387 aa, Trichechus manatus latirostris
  WT Manatee STING
MVEMPHSSLHPSIPRHRGHGIQKAAFVLLVACLVALWELGEPPGHTLQWLVCQLASLQLGLLLKVICSLAEELCHVHSRYQSSYWRAVRACMGCPIRRGALLLLSCYFYFCFPNMADLPLTWTLALLGLLQAMNILLSLQGLTPAEISAICEKRNLNVAHGLAWSYYIGYLRLILPGLQDRIRIYNLQHNNMLRGTGSQRLHILFPLDCGVPNDLSVADANIRFLQKLPQQSADCAGIKGRVYTNSVYQLLEHGQPAGICVLEYATPLQTLFAMSQDGRAGFSREDRLEQAKLFCRTLEDILADAPEYQNNCRLIVYQESAEGSSFSLSQEILRHLRQEEREEVTVGSVGTSVVPSPSSPSTSSLSQEPKLLISGMEQPLPLRTDVF

SEQ ID NO: 368 - protein, 378 aa, Callorhinchus milii
  WT Ghost shark STING
MSDSIPRPRGKVATYVGLILMSGLACLYFMLTPDYHIKFIVQQVAQQLIVSFFALCLLRLCEFVEELGHKQTRYQNSWVRALNASLDWKKYGFCLLISLLFNWVLPYEKHMSYAVPTVGQTISLTCFCVLFLKVFQLDVLSPAQISEISETNKCNVAHGLAWSYYLGYLKIVLPKLEEKINQYHREYGNVLQQKGKKLYILIPFSCKVLDKLEKVDTNIVFYQNLPELLVDRAGIKSRSYKHSIYLIYDQKKQQPHHCILEYATPLRSLFEMTNDSAAAFSKEQRLDQAKLFYRTLKSILNNVPEVTGSYRLIPYDDDLEGAELGPHFVSEEILKHMRQELTEYPVAEPSNANETDCMSSEPHLMISDDPKPLRSYCP

SEQ ID NO: 369 - protein, 378 aa, Mus musculus
  WT Mouse STING
MPYSNLHPAIPRPRGHRSKYVALIFLVASLMILWVAKDPPNHTLKYLALHLASHELGLLLKNLCCLAEELCHVQSRYQGSYWKAVRACLGCPIHCMAMILLSSYFYFLQNTADIYLSWMFGLLVLYKSLSMLLGLQSLTPAEVSAVCEEKKLNVAHGLAWSYYIGYLRLILPGLQARIRMFNQLHNNMLSGAGSRRLYILFPLDCGVPDNLSVVDPNIRFRDMLPQQNIDRAGIKNRVYSNSVYEILENGQPAGVCILEYATPLQTLFAMSQDAKAGFSREDRLEQAKLFCRTLEEILEDVPESRNNCRLIVYQEPTDGNSFSLSQEVLRHIRQEEKEEVTMNAPMTSVAPPPSVLSQEPRLLISGMDQPLPLRTDLI

SEQ ID NO: 370 - protein, 43 aa, Homo sapiens
  Human STING C-terminal tail (CTT)
EKEEVTVGSLKTSAVPSTSTMSQEPELLISGMEKPLPLRTDFS

SEQ ID NO: 371 - protein, 43 aa, Sarcophilus harrisii
  Tasmanian devil STING C-terminal tail (CTT)
RQEEFAIGPKRAMTVTTSSTLSQEPQLLISGMEQPLSLRTDGF

SEQ ID NO: 372 - protein, 43 aa, Callithrix jacchus
  Marmoset STING C-terminal tail (CTT)
EEEEVTVGSLKTSEVPSTSTMSQEPELLISGMEKPLPLRSDLF

SEQ ID NO: 373 - protein, 42 aa, Bos taurus
  Cattle/Bovine STING C-terminal tail (CTT)
EREVTMGSTETSVMPGSSVLSQEPELLISGLEKPLPLRSDVF

SEQ ID NO: 374 - protein, 42 aa, Felis catus
  Cat STING C-terminal tail (CTT)
EREVTVGSVGTSMVRNPSVLSQEPNLLISGMEQPLPLRTDVF

SEQ ID NO: 375 - protein, 35 aa, Struthio camelus australis
  Ostrich STING C-terminal tail (CTT)
RQEEYTVCDGTLCSTDLSLQISESDLPQPLRSDCL

SEQ ID NO: 376 - protein, 42 aa, Sus scrofa
  Boar STING C-terminal tail (CTT)
EREVTMGSAETSVVPTSSTLSQEPELLISGMEQPLPLRSDIF

SEQ ID NO: 377 - protein, 43 aa, Rousettus aegyptiacus
  Bat STING C-terminal tail (CTT)
EKEEVTVGTVGTYEAPGSSTLHQEPELLISGMDQPLPLRTDIF

SEQ ID NO: 378 - protein, 48 aa, Trichechus manatus latirostris
  Manatee STING C-terminal tail (CTT)
EREEVTVGSVGTSVVPSPSSPSTSSLSQEPKLLISGMEQPLPLRTDVF

SEQ ID NO: 379 - protein, 43 aa, Nipponia nippon
  Crested ibis STING C-terminal tail (CTT)
CHEEYTVYEGNQPHNPSTTLHSTELNLQISESDLPQPLRSDCF

SEQ ID NO: 380 - protein, 43 aa, Latimeria chalumnae
  Coelacanth STING (SEQ ID NO:345) C-terminal tail (CTT)
QKEEYFMSEQTQPNSSSTSCLSTEPQLMISDTDAPHTLKRQVC

SEQ ID NO: 381 - protein, 42 aa, Latimeria chalumnae
  Coelacanth STING (SEQ ID NO:346) C-terminal tail (CTT)
QKEEYFMSEQTQPNSSSTSCLSTEPQLMISDTDAPHTLKSGF

SEQ ID NO: 382 - protein, 71 aa, Danio rerio
  Zebrafish STING C-terminal tail (CTT)
DGEIFMDPTNEVHPVPEEGPVGNCNGALQATFHEEPMSDEPTLMFSRPQSLRSEPVETTDYFNPSSAMKQN

SEQ ID NO: 383 - protein, 38 aa, Callorhinchus milii
  Ghost shark STING C-terminal tail (CTT)
LTEYPVAEPSNANETDCMSSEPHLMISDDPKPLRSYCP

SEQ ID NO: 384 - protein, 43 aa, Mus musculus
  Mouse STING C-terminal tail (CTT)
EKEEVTMNAPMTSVAPPPSVLSQEPRLLISGMDQPLPLRTDLI

SEQ ID NO: 385 - protein, 78 aa, Salmonella typhimurium
  LppA (strain LT2/ ATCC 700720)
MNRTKLVLGAVILGSTLLAGCSSNAKIDQLSSDVQTLNAKVDQLSNDVNAMRSDVQAAKDDAARANQRLDNQATKYRK

SEQ ID NO: 386 - protein, 79 aa, Salmonella typhimurium
  LppB (strain LT2/ ATCC 700720)
MNRTNQLILGAVVLGSTLLAGCSSNAKIDQLSSDVQTLSAKVEQLSNDVNAMRSDVQAAKDDAARANQRLDNKVFRICK

SEQ ID NO: 387 - DNA, 237 bp, Salmonella typhimurium
  lppA
ttacttacggtatttagtagcctggttgtccagacgctggttagcgcgagctgcgtcgtctttagcagcctgaacgtcggaacgcattgcgttcacgtcgttgctcagctggtcaactttagcgttcagagtctgaacgtcagaagacagctgatcgattttagcgttgctggagcaaccagccagcagagtagaacccaggattaccgcgcccagtaccagtttagtacgattcat

SEQ ID NO: 388 - DNA, 240 bp, Salmonella typhimurium
  lppB
ttatttacagatgcggaatactttgttgtccagacgttggttcgcgcgagcagcatcgtctttagcagcctgaacgtcggaacgcattgcatttacgtcattactcagttgctcaactttagcgctcagcgtctgtacatcggaagacaactgatcgattttagcgttgcttgaacaacctgccagtaacgtggaacccagaactactgcacctaagatcagctggttagtacggttcat

SEQ ID NO: 389 - DNA, 6 bp, Artificial Sequence
  Shine-Dalgarno
aggagg

SEQ ID NO: 390 - DNA, 4 bp, Artificial Sequence
  Shine-Dalgarno
agga

SEQ ID NO: 391 - DNA, 4 bp, Artificial Sequence
  Shine-Dalgarno
gagg

SEQ ID NO: 392 - DNA, 4 bp, Artificial Sequence
  Shine-Dalgarno
ggag

SEQ ID NO: 393 - DNA, 45 bp, Artificial Sequence; identical to SEQ ID NO: 241
  bacterial promoter

SEQ ID NO: 394 - DNA, 43 bp, Artificial Sequence
  bacterial promoter
ttatgcttgacgctgcgtaaggtttttgttataatacaccaag

SEQ ID NO: 395 - DNA, 44 bp, Artificial Sequence
  bacterial promoter
attatgtcttgacatgtagtgagtgggctggtaaatgcagcaag

SEQ ID NO: 396 - DNA, 631 bp, Artificial Sequence
  Salmonella rpsm promoter
gatcccggagttcatgcgtgatgcaatgaaagtgccgttctacttcggtgggacctcactgcttatcgttgttgtcgtgattatggactttatggctcaagtgcaaactctgatgatgtccagtcagtatgagtctgcattgaagaaggcgaacctgaaaggctacggccgttaattggtcgcctgagaagttacggagagtaaaaatgaaagttcgtgcttccgtcaagaaattatgccgtaactgcaaaatcgttaagcgtgatggtgtcatccgtgtgatttgcagtgccgagccgaagcataaacagcgccaaggctgattttttcgcatatttttcttgcaaagttgggttgagctggctagattagccagccaatcttttgtatgtctgtacgtttccatttgagtatcctgaaaacgggcttttcagcatggtacgtacatattaaatagtaggagtgcatagtggcccgtatagcaggcattaacattcctgatcagaaacacgccgtgatcgcgttaacttcgatctacggtgtcggcaagacccgttctaaagccatcctggctgcagcgggtatcgctgaaaatgttaagatcctctagatttaagaaggagatatacat

SEQ ID NO: 397 - RNA, 7 nt, Artificial Sequence
  Kozak
accaugg

SEQ ID NO: 398 - RNA, 6 nt, Artificial Sequence
  motif
aauaaa

SEQ ID NO: 399 - DNA, 8330 bp, Artificial Sequence
  synthetic DNA construct
  enhancer (1704)...(2007): CMV enhancer
  promoter (2008)...(2211): human cytomegalovirus (CMV) immediate early promoter
  misc_feature (2256)...(2261): Kozak sequence
  misc_feature (2262)...(2845): mu4-1BBL ATG83-310 CO
  misc_feature (2955)...(3008): 2A peptide from Thosea asigna virus capsid protein
  misc_feature (3009)...(4010): mouse IL-12p40
  sig_peptide (3009)...(3027): IL-12p40 signal sequence
  misc_feature (4011)...(4055): Linker
  misc_feature (4056)...(4634): mouse IL-12p35 del1-22
  misc_feature (4644)...(4700): 2A peptide from porcine teschovirus-1 polyprotein
  gene (4701)...(5705): human STING
  polyA_signal (6389)...(6613): bovine growth hormone polyadenylation signal
gaacaatggcgtgaagacctttgtgggcggtaactgtaccgttagcctgatgttgatgtcgctgggcggtctctttgcccataatctcgttgactgggtatccgtcgcgacctatcaggccgcctccggcggcggcgcgcgccatatgcgcgagctgttaacccagatgggtcagttgtatggccatgtcgccgatgaactggcgacgccgtcttccgcaattcttgatattgaacgcaaagttacggcattgacccgcagcggcgagctgccggttgataactttggcgtaccgctggcgggaagcctgatcccctggatcgacaaacagctcgataacggccagagccgcgaagagtggaaaggccaggcggaaaccaacaagattctcaatactgcctctgtgattccggttgatggtttgtgtgtgcgcgtcggcgcgctgcgctgtcacagccaggcgttcaccatcaagctgaaaaaagaggtatccattccgacggtggaagaactgctggcggcacataatccgtgggcgaaagtggtgccgaacgatcgtgatatcactatgcgcgaattaaccccggcggcggtgaccggcacgttgactacgccggttggtcgtctgcgtaagctgaacatggggccagagttcttgtcggcgtttaccgtaggcgaccagttgttatggggcgccgccgagccgctgcgtcgaatgctgcgccagttggcgtagttgataatctcatgaccaaaatcccttaacgtgagttttcgttccactgagcgtcagaccccgtagaaaagatcaaaggatcttcttgagatcctttttttctgcgcgtaatctgctgcttgcaaacaaaaaaaccaccgctaccagcggtggtttgtttgccggatcaagagctaccaactctttttccgaaggtaactggcttcagcagagcgcagataccaaatactgtccttctagtgtagccgtagttaggccaccacttcaagaactctgtagcaccgcctacatacctcgctctgctaatcctgttaccagtggctgctgccagtggcgataagtcgtgtcttaccgggttggactcaagacgatagttaccggataaggcgcagcggtcgggctgaacggggggttcgtgcacacagcccagcttggagcgaacgacctacaccgaactgagatacctacagcgtgagctatgagaaagcgccacgcttcccgaagggagaaaggcggacaggtatccggtaagcggcagggtcggaacaggagagcgcacgagggagcttccagggggaaacgcctggtatctttatagtcctgtcgggtttcgccacctctgacttgagcgtcgatttttgtgatgctcgtcaggggggcggagcctatggaaaaacgccagcaacgcggcctttttacggttcctggccttttgctggccttttgctcacatgttctttcctgcgttatcccctgattctgtggataaccgtattaccgcctttgagtgagctgataccgctcgccgcagccgaacgaccgagcgcagcgagtcagtgagcgaggaagcggtagagcgcccaatacgcaaaccgcctctccccgcgcgttggccgattcattaatgcagctggcacgacaggtttcccgactggaaagcgggcagtgagcgcaacgcaagtcgacccgttacataacttacggtaaatggcccgcctggctgaccgcccaacgacccccgcccattgacgtcaataatgacgtatgttcccatagtaacgccaatagggactttccattgacgtcaatgggtggagtatttacggtaaactgcccacttggcagtacatcaagtgtatcatatgccaagtacgccccctattgacgtcaatgacggtaaatggcccgcctggcattatgcccagtacatgaccttatgggactttcctacttggcagtacatctacgtattagtcatcgctattaccatggtgatgcggttttggcagtacatcaatgggcgtggatagcggtttgactcacggggatttccaagtctccaccccattgacgtcaatgggagtttgttttggcaccaaaatcaacgggactttccaaaatgtcgtaacaactccgccccattgacgcaaatgggcggtaggcgtgtacggtgggaggtctatataagcagagctggtttagtgaaccgtcttaagcgctagcgattacgccaagctcggccaccatgctctacggcctggtggccttggtgctcctcctgctgattgccgcctgtgtgccgatcttcacccggactgaacccagaccggcccttactatcaccacttcccctaacctcggcacccgcgaaaacaacgccgaccaggtcaccccggtgtcgcacatcggctgccccaacacgacacagcagggatcacccgtgtttgccaagctgctggcaaagaaccaggcctctctctgcaacaccaccctgaactggcacagccaggatggagctggctcatcgtacctgagccagggccttcgctacgaagaggacaagaaggaactggtggtggactccccgggactgtactacgtgttcctcgaactcaagctgtcgcctaccttcaccaacactgggcacaaagtgcagggatgggtgtccctggtgctgcaagccaagccccaagtcgacgacttcgacaacttggcgctgaccgtggagctgttcccgtgctccatggaaaacaagcttgtggaccgcagctggagccagctgcttctgctgaaagccggtcaccggctgtccgtgggactgagggcctacctccacggagcgcaagacgcctacagggactgggagctctcctatccgaataccacctcgttcgggctgttcctggtcaagccagacaatccttgggagggatcaggcgagggaagaggctcgcttctgacttgcggcgatgtcgaggaaaacccgggcccttgtcctcagaagctaaccatctcctggtttgccatcgttttgctggtgtctccactcatggccatgtgggagctggagaaagacgtttatgttgtagaggtggactggactcccgatgcccctggagaaacagtgaacctcacctgtgacacgcctgaagaagatgacatcacctggacctcagaccagagacatggagtcataggctctggaaagaccctgaccatcactgtcaaagagtttctagatgctggccagtacacctgccacaaaggaggcgagactctgagccactcacatctgctgctccacaagaaggaaaatggaatttggtccactgaaattttaaaaaatttcaaaaacaagactttcctgaagtgtgaagcaccaaattactccggacggttcacgtgctcatggctggtgcaaagaaacatggacttgaagttcaacatcaagagcagtagcagttcccctgactctcgggcagtgacatgtggaatggcgtctctgtctgcagagaaggtcacactggaccaaagggactatgagaagtattcagtgtcctgccaggaggatgtcacctgcccaactgccgaggagaccctgcccattgaactggcgttggaagcacggcagcagaataaatatgagaactacagcaccagcttcttcatcagggacatcatcaaaccagacccgcccaagaacttgcagatgaagcctttgaagaactcacaggtggaggtcagctgggagtaccctgactcctggagcactccccattcctacttctccctcaagttctttgttcgaatccagcgcaagaaagaaaagatgaaggagacagaggaggggtgtaaccagaaaggtgcgttcctcgtagagaagacatctaccgaagtccaatgcaaaggcgggaatgtctgcgtgcaagctcaggatcgctattacaattcctcatgcagcaagtgggcatgtgttccctgcagggtccgatccggtggcggtggctcgggcggtggtgggtcgggtggcggcggatctagggtcattccagtctctggacctgccaggtgtcttagccagtcccgaaacctgctgaagaccacagatgacatggtgaagacggccagagaaaaactgaaacattattcctgcactgctgaagacatcgatcatgaagacatcacacgggaccaaaccagcacattgaagacctgtttaccactggaactacacaagaacgagagttgcctggctactagagagacttcttccacaacaagagggagctgcctgcccccacagaagacgtctttgatgatgaccctgtgccttggtagcatctatgaggacttgaagatgtaccagacagagttccaggccatcaacgcagcacttcagaatcacaaccatcagcagatcattctagacaagggcatgctggtggccatcgatgagctgatgcagtctctgaatcataatggcgagactctgcgccagaaacctcctgtgggagaagcagacccttacagagtgaaaatgaagctctgcatcctgcttcacgccttcagcacccgcgtcgtgaccatcaacagggtgatgggctatctgagctccgccggaagcggagctactaatttctcactgctgaaacaggccggcgatgttgaagagaatccgggacctccccactccagcctgcatccatccatcccgtgtcccaggggtcacggggcccagaaggcagccttggttctgctgagtgcctgcctggtgaccctttgggggctaggagagccaccagagcacactctccggtacctggtcctccacctagcctccctgcagctgggactgctgttaaacggggtctgcagcctggctgaggagctgcgccacatccactccaggtaccggggcagctactggaggactgtgcgggcctgcctgggctgccccctccgccgtggggccctgttgctgctgtccatctatttctactactccctcccaaatgcggtcggcccgcccttcacttggatgcttgccctcctgggcctctcgcaggcactgaacatcctcctgggcctcaagggcctggccccagctgagatctctgcagtgtgtgaaaaagggaatttcaacgtggcccatgggctggcatggtcatattacatcggatatctgcggctgatcctgccagagctccaggcccggattcgaacttacaatcagcattacaacaacctgctacggggtgcagtgagccagcggctgtatattctcctcccattggactgtggggtgcctgataacctgagtatggctgaccccaacattcgcttcctggataaactgccccagcagaccggtgaccgtgctggcatcaaggatcgggtttacagcaacagcatctatgagcttctggagaacgggcagcgggcgggcacctgtgtcctggagtacgccacccccttgcagactttgtttgccatgtcacaatacagtcaagctggctttagccgggaggatggccttgagcaggccaaactcttctgccggacacttgaggacatcctggcagatgcccctgagtctcagaacaactgccgcctcattgcctaccaggaacctgcagatgacagcagcttctcgctgtcccaggaggttctccggcacctgcggcaggagaggcaagaggaatttgccatcggccccaaaagagcgatgacagtgactacttcctccactctcagccaggagccccagttgctcattagcgggatggagcaaccgctttctctgcgcacagacgggttctgaaccggtatgttgctcggcaacggcctggtctgtgccaagtgtttgctgacgcaacccccactggctggggcttggccataggccatcagcgcatgcgtggaacctttgtggctcctctgccgatccatactgcggaactcctagccgcttgttttgctcgcagccggtctggggcaaagctcatcggaactgacaattctgtcgtcctctcgcggaaatatacatcgtttccatggctgctaggttgtactgccaactgcatccttcgcgggacgtcctttgtttacgtcccgtcggcgctgaatcccgcggacgacccctctcggggccgcttgggactctctcgtccccttctccgtctgccgttccagccgaccacggggcgcacctctctttacgcggtctccccgtctgtgccttctcatctgccggtccgtgtgcacttcgcttcacctctgcacgttgcatggagaccaccgtgaacgcccatcagatcctgcccaaggtcttacataagaggactcttggactcccagcaatgtcggcgcgccctgtgccttctagttgccagccatctgttgtttgcccctcccccgtgccttccttgaccctggaaggtgccactcccactgtcctttcctaataaaatgaggaaattgcatcgcattgtctgagtaggtgtcattctattctggggggtggggtggggcaggacagcaagggggaggattgggaagacaatagcaggcatgctggggatgcggtgggctctatggggatccgctccggctcgagttaagccagccccgacacccgccaacacccgctgacgcgccctgacgggcttgtctgctcccggcatccgcttacagacaagctgtgaccgtctccgggagctgcatgtgtcagaggttttcaccgtcatcaccgaaacgcgcgagacgaaagggcctcgtgatacgcctatttttataggttaatgtcatgataataatggtttcttagacgtcaggtggcacttttcggggaaatgtgaagctttagaaaaactcatcgagcatcaaatgaaactgcaatttattcatatcaggattatcaataccatatttttgaaaaagccgtttctgtaatgaaggagaaaactcaccgaggcagttccataggatggcaagatcctggtatcggtctgcgattccgactcgtccaacatcaatacaacctattaatttcccctcgtcaaaaataaggttatcaagtgagaaatcaccatgagtgacgactgaatccggtgagaatggcaaaagtttatgcatttctttccagacttgttcaacaggccagccattacgctcgtcatcaaaatcactcgcatcaaccaaaccgttattcattcgtgattgcgcctgagcgagacgaaatacgcgatcgctgttaaaaggacaattacaaacaggaatcgaatgcaaccggcgcaggaacactgccagcgcatcaacaatattttcacctgaatcaggatattcttctaatacctggaatgctgtttttccggggatcgcagtggtgagtaaccatgcatcatcaggagtacggataaaatgcttgatggtcggaagaggcataaattccgtcagccagtttagtctgaccatctcatctgtaacatcattggcaacgctacctttgccatgtttcagaaacaactctggcgcatcgggcttcccatacaagcgatagattgtcgcacctgattgcccgacattatcgcgagcccatttatacccatataaatcagcatccatgttggaatttaatcgcggcctcgacgtttcccgttgaatatggctcataacaccccttgtattactgtttatgtaagcagacagttttattgttcatgatgatatatttttatcttgtgcaatgtaacatcagagattttgagacacgggccagagctgcaagcttctgtcagaccaagtttactcatatatactttagattgatttaaaacttcatttttaatttaaaaggatctaggtgaagatcctttatggtgaaggatgcgccacaggatactggcgcgcatacacagcacatctctttgcaggaaaaaaacgctatgaaaaatgttggttttatcggctggcgcggaatggtcggctctgttctcatgcaacgcatggtagaggagcgcgatttcgacgctattcgccctgttttcttttctacctcccagtttggacaggcggcgcccaccttcggcgacacctccaccggcacgctacaggacgcttttgatctggatgcgctaaaagcgctcgatatcatcgtgacctgccagggcggcgattataccaacgaaatttatccaaagctgcgcgaaagcggatggcagggttactggattgatgcggcttctacgctgcgcatgaaagatgatgccattattattctcgacccggtcaaccaggacgtgattaccgacggcct

SEQ ID NO: 400 - DNA, 1566 bp, Homo sapiens
  Interleukin 15 receptor subunit alpha (IL15RA), transcript variant 1, mRNA (GenBank Accession No.: NM_002189.4)
ctgggcagcgctcgcccggggagtccagcggtgtcctgtggagctgccgccatggccccgcggcgggcgcgcggctgccggaccctcggtctcccggcgctgctactgctgctgctgctccggccgccggcgacgcggggcatcacgtgccctccccccatgtccgtggaacacgcagacatctgggtcaagagctacagcttgtactccagggagcggtacatttgtaactctggtttcaagcgtaaagccggcacgtccagcctgacggagtgcgtgttgaacaaggccacgaatgtcgcccactggacaacccccagtctcaaatgcattagagaccctgccctggttcaccaaaggccagcgccaccctccacagtaacgacggcaggggtgaccccacagccagagagcctctccccttctggaaaagagcccgcagcttcatctcccagctcaaacaacacagcggccacaacagcagctattgtcccgggctcccagctgatgccttcaaaatcaccttccacaggaaccacagagataagcagtcatgagtcctcccacggcaccccctctcagacaacagccaagaactgggaactcacagcatccgcctcccaccagccgccaggtgtgtatccacagggccacagcgacaccactgtggctatctccacgtccactgtcctgctgtgtgggctgagcgctgtgtctctcctggcatgctacctcaagtcaaggcaaactcccccgctggccagcgttgaaatggaagccatggaggctctgccggtgacttgggggaccagcagcagagatgaagacttggaaaactgctctcaccacctatgaaactcggggaaaccagcccagctaagtccggagtgaaggagcctctctgctttagctaaagacgactgagaagaggtgcaaggaagcgggctccaggagcaagctcaccaggcctctcagaagtcccagcaggatctcacggactgccgggtcggcgcctcctgcgcgagggagcaggttctccgcattcccatgggcaccacctgcctgcctgtcgtgccttggacccagggcccagcttcccaggagagaccaaaggcttctgagcaggatttttatttcattacagtgtgagctgcctggaatacatgtggtaatgaaataaaaaccctgccccgaatcttccgtccctcatcctaactttcagttcacagagaaaagtgacatacccaaagctctctgtcaattacaaggcttctcctggcgtgggagacgtctacagggaagacaccagcgtttgggcttctaaccaccctgtctccagctgctctgcacacatggacagggacctgggaaaggtgggagagatgctgagcccagcgaatcctctccattgaaggattcaggaagaagaaaactcaactcagtgccattttacgaatatatgcgtttatatttatacttccttgtctattatatctatacattatatattatttgtattttgacattgtaccttgtataaacaaaataaaacatctattttcaata

SEQ ID NO: 401 - protein, 267 aa, Homo sapiens
  Mature Human IL-15 Receptor Subunit Alpha (IL-15RA; UniProtKB Accession No.: Q13261)
MAPRRARGCRTLGLPALLLLLLLRPPATRGITCPPPMSVEHADIWVKSYSLYSRERYICNSGFKRKAGTSSLTECVLNKATNVAHWTTPSLKCIRDPALVHQRPAPPSTVTTAGVTPQPESLSPSGKEPAASSPSSNNTAATTAAIVPGSQLMPSKSPSTGTTEISSHESSHGTPSQTTAKNWELTASASHQPPGVYPQGHSDTTVAISTSTVLLCGLSAVSLLACYLKSRQTPPLASVEMEAMEALPVTWGTSSRDEDLENCSHHL

SEQ ID NO: 402 - DNA, 2015 bp, Homo sapiens
  IL-15 (IL-15 single chain (sc)), transcript variant 3, mRNA (GenBank Accession No.: NM_000585.5)
cttttcgccaggggttgggactccgggtggcaggcgcccgggggaatcccagctgactcgctcactgccttcgaagtccggcgccccccgggagggaactgggtggccgcaccctcccggctgcggtggctgtcgccccccaccctgcagccaggactcgatggagaatccattccaatatatggccatgtggctctttggagcaatgttccatcatgttccatgctgctgacgtcacatggagcacagaaatcaatgttagcagatagccagcccatacaagatcgtattgtattgtaggaggcattgtggatggatggctgctggaaaccccttgccatagccagctcttcttcaatacttaaggatttaccgtggctttgagtaatgagaatttcgaaaccacatttgagaagtatttccatccagtgctacttgtgtttacttctaaacagtcattttctaactgaagctggcattcatgtcttcattttgggctgtttcagtgcagggcttcctaaaacagaagccaactgggtgaatgtaataagtgatttgaaaaaaattgaagatcttattcaatctatgcatattgatgctactttatatacggaaagtgatgttcaccccagttgcaaagtaacagcaatgaagtgctttctcttggagttacaagttatttcacttgagtccggagatgcaagtattcatgatacagtagaaaatctgatcatcctagcaaacaacagtttgtcttctaatgggaatgtaacagaatctggatgcaaagaatgtgaggaactggaggaaaaaaatattaaagaatttttgcagagttttgtacatattgtccaaatgttcatcaacacttcttgattgcaattgattctttttaaagtgtttctgttattaacaaacatcactctgctgcttagacataacaaaacactcggcatttcaaatgtgctgtcaaaacaagtttttctgtcaagaagatgatcagaccttggatcagatgaactcttagaaatgaaggcagaaaaatgtcattgagtaatatagtgactatgaacttctctcagacttactttactcatttttttaatttattattgaaattgtacatatttgtggaataatgtaaaatgttgaataaaaatatgtacaagtgttgttttttaagttgcactgatattttacctcttattgcaaaatagcatttgtttaagggtgatagtcaaattatgtattggtggggctgggtaccaatgctgcaggtcaacagctatgctggtaggctcctgccagtgtggaaccactgactactggctctcattgacttccttactaagcatagcaaacagaggaagaatttgttatcagtaagaaaaagaagaactatatgtgaatcctcttctttatactgtaatttagttattgatgtataaagcaactgttatgaaataaagaaattgcaataactggcatataatgtccatcagtaaatcttggtggtggtggcaataataaacttctactgataggtagaatggtgtgcaagcttgtccaatcacggattgcaggccacatgcggcccaggacaactttgaatgtggcccaacacaaattcataaactttcatacatctcgtttttagctcatcagctatcattagcggtagtgtatttaaagtgtggcccaagacaattcttcttattccaatgtggcccagggaaatcaaaagattggatgcccctggtatagaaaactaatagtgacagtgttcatatttcatgctttcccaaatacaggtattttattttcacattctttttgccatgtttatataataataaagaaaaaccctgttgatttgttggagccattgttatctgacagaaaataattgtttatattttttgcactacactgtctaaaattagcaagctctcttctaatggaactgtaagaaagatgaaatatttttgttttattataaatttatttcaccttaa

SEQ ID NO: 403 - protein, 162 aa, Homo sapiens
  mature Human IL-15 (IL-15sc) (UniProtKB Accession No.: P40933)
MRISKPHLRSISIQCYLCLLLNSHFLTEAGIHVFILGCFSAGLPKTEANWVNVISDLKKIEDLIQSMHIDATLYTESDVHPSCKVTAMKCFLLELQVISLESGDASIHDTVENLIILANNSLSSNGNVTESGCKECEELEEKNIKEFLQSFVHIVQMFINTS

SEQ ID NO: 404 - protein, 243 aa, Artificial Sequence
  Human IL-15Ralpha-IL-15sc fusion protein
  Portion of human IL-15Ralpha
  (GGGGS)4  linker
  Portion of human IL-15sc
MAPRRARGCRTLGLPALLLLLLLRPPATRGITCPPPMSVEHADIWVKSYSLYSRERYICNSGFKRKAGTSSLTECVLNKATNVAHWTTPSLKCIRDPALVHQRPAPPSGGGGSGGGGSGGGGSGGGGSANWVNVISDLKKIEDLIQSMHIDATLYTESDVHPSCKVTAMKCFLLELQVISLESGDASIHDTVENLIILANNSLSSNGNVTESGCKECEELEEKNIKEFLQSFVHIVQMFINTS

SEQ ID NO: 405 - protein, 263 aa, Mus musculus
  PEPTIDE (1)...(263): Murine IL-15Ralpha (Interleukin-15 receptor subunit alpha; UniProtKB Accession No.: Q60819)
MASPQLRGYGVQAIPVLLLLLLLLLLPLRVTPGTTCPPPVSIEHADIRVKNYSVNSRERYVCNSGFKRKAGTSTLIECVINKNTNVAHWTTPSLKCIRDPSLAHYSPVPTVVTPKVTSQPESPSPSAKEPEAFSPKSDTAMTTETAIMPGSRLTPSQTTSAGTTGTGSHKSSRAPSLAATMTLEPTASTSLRITEISPHSSKMTKVAISTSVLLVGAGVVMAFLAWYIKSRQPSQPCRVEVETMETVPMTVRASSKEDEDTGA

SEQ ID NO: 406 - protein, 162 aa, Mus musculus
  Murine IL-15 (single chain (sc); UniProtKB Accession No.: P48346)
MKILKPYMRNTSISCYLCFLLNSHFLTEAGIHVFILGCVSVGLPKTEANWIDVRYDLEKIESLIQSIHIDTTLYTDSDFHPSCKVTAMNCFLLELQVILHEYSNMTLNETVRNVLYLANSTLSSNKNVAESGCKECEELEEKTFTEFLQSFIRIVQMFINTS

SEQ ID NO: 407 - protein, 266 aa, Artificial Sequence
  Murine (mu) IL-15Ralpha-IL-15sc fusion protein
  Portion of murine IL-15Ralpha
  (GGGGS)4 linker
  Portion of murine IL-15 (muIL-15sc)
MASPQLRGYGVQAIPVLLLLLLLLLLPLRVTPGTTCPPPVSIEHADIRVKNYSVNSRERYVCNSGFKRKAGTSTLIECVINKNTNVAHWTTPSLKCIRDPSLAHYSPVPTVVTPKVTSQPESPSPSAKEPEAGGGGSGGGGSGGGGSGGGGSNWIDVRYDLEKIESLIQSIHIDTTLYTDSDFHPSCKVTAMNCFLLELQVILHEYSNMTLNETVRNVLYLANSTLSSNKNVAESGCKECEELEEKTFTEFLQSFIRIVQMFINTS

SEQ ID NO: 408 - DNA, 40 bp, Artificial Sequence
  New spacer
acgtcttctctttttaaaggacctcgtgaaataaaagtgc

SEQ ID NO: 409 - DNA, 80 bp, Artificial Sequence
  Longer spacer
tccgagccaagtaaggaggtccctctctctctctccccccacgtcttctctttttaaaggacctcgtgaaataaaagtgc

SEQ ID NO: 410 - DNA, 1515 bp, Artificial Sequence
  DLL3HL x CD3HL TCRA
atggaaactgatactctgctgctctgggtgctgctgctttgggtgcccggttccaccggggatcaggtgcagctggtacagagcggcgcagaagtgaagaagcccggagccagcgttaaagtgtcctgcaaggcctctggctacaccttcaccaactatggcatgaactgggtccggcaggctcctgggcaagggctggagtggatgggctggatcaatacttatacaggtgaaccaacctatgcggatgattttaaaggaagagtgaccatgactacagacacatctacttccacagcatacatggagttgcgcagcctccgatctgatgacactgctgtgtactactgtgccaggattggagacagttcaccgagtgactactgggggcaaggtacgcttgttaccgtctcctcaggtggcggtggctcgggcggtggtgggtcgggtggcggcggatctgaaattgtgatgacccagagccctgcaactttgtctgtttctccaggggagagggccacactttcctgtaaagcttcccagtctgtcagcaatgatgtggtgtggtaccagcagaagccaggacaagcaccccggctactcatctattatgcgagcaacagatatactggaattcctgcccgcttcagtggctcaggttcagggacagagttcaccctgactatatcgtccctgcagagtgaagactttgctgtatactactgccagcaagactacacgagcccctggacatttggccagggcaccaagctggagatcaaaggcgggggcggctctgaggtgcagctggtggagtctgggggaggcttggtgcagcctggaaagtccctgaaactctcctgtgaggcctctggattcaccttcagcggctatggcatgcactgggtccgccaggctccagggagggggctggagtcggtcgcatacattactagtagtagtattaatatcaaatatgctgacgctgtgaaaggccggttcaccgtctccagagacaatgccaagaacttactgtttctacaaatgaacattctcaagtctgaggacacagccatgtactactgtgcaagattcgactgggacaaaaattactggggccaaggaaccatggtcaccgtctcctcaggcggaggtggttccggtgggggtggtagcggaggtggtgggtcagacatccagatgacccagtctccatcatcactgcctgcctccctgggagacagagtcactatcaattgtcaggccagtcaggacattagcaattatttaaactggtaccagcagaaaccagggaaagctcctaagctcctgatctattatacaaataaattggcagatggagtcccatcaaggttcagtggcagtggttctgggagagattcttctttcactatcagcagcctggaatccgaagatattggatcttattactgtcaacagtattataactatccgtggacgttcggacctggcaccaagctggaaatcaaatga

SEQ ID NO: 411 - protein, 504 aa, Artificial Sequence
  DLL3HL x CD3HL TCRA
METDTLLLWVLLLWVPGSTGDQVQLVQSGAEVKKPGASVKVSCKASGYTFTNYGMNWVRQAPGQGLEWMGWINTYTGEPTYADDFKGRVTMTTDTSTSTAYMELRSLRSDDTAVYYCARIGDSSPSDYWGQGTLVTVSSGGGGSGGGGSGGGGSEIVMTQSPATLSVSPGERATLSCKASQSVSNDVVWYQQKPGQAPRLLIYYASNRYTGIPARFSGSGSGTEFTLTISSLQSEDFAVYYCQQDYTSPWTFGQGTKLEIKGGGGSEVQLVESGGGLVQPGKSLKLSCEASGFTFSGYGMHWVRQAPGRGLESVAYITSSSINIKYADAVKGRFTVSRDNAKNLLFLQMNILKSEDTAMYYCARFDWDKNYWGQGTMVTVSSGGGGSGGGGSGGGGSDIQMTQSPSSLPASLGDRVTINCQASQDISNYLNWYQQKPGKAPKLLIYYTNKLADGVPSRFSGSGSGRDSSFTISSLESEDIGSYYCQQYYNYPWTFGPGTKLEIK

SEQ ID NO: 412 - protein, 8 aa, Artificial Sequence
  FLAG tag
DYKDDDDK

SEQ ID NO: 413 - protein, 512 aa, Artificial Sequence
  DLL3HL x CD3HL-FLAG TCRA
METDTLLLWVLLLWVPGSTGDQVQLVQSGAEVKKPGASVKVSCKASGYTFTNYGMNWVRQAPGQGLEWMGWINTYTGEPTYADDFKGRVTMTTDTSTSTAYMELRSLRSDDTAVYYCARIGDSSPSDYWGQGTLVTVSSGGGGSGGGGSGGGGSEIVMTQSPATLSVSPGERATLSCKASQSVSNDVVWYQQKPGQAPRLLIYYASNRYTGIPARFSGSGSGTEFTLTISSLQSEDFAVYYCQQDYTSPWTFGQGTKLEIKGGGGSEVQLVESGGGLVQPGKSLKLSCEASGFTFSGYGMHWVRQAPGRGLESVAYITSSSINIKYADAVKGRFTVSRDNAKNLLFLQMNILKSEDTAMYYCARFDWDKNYWGQGTMVTVSSGGGGSGGGGSGGGGSDIQMTQSPSSLPASLGDRVTINCQASQDISNYLNWYQQKPGKAPKLLIYYTNKLADGVPSRFSGSGSGRDSSFTISSLESEDIGSYYCQQYYNYPWTFGPGTKLEIKDYKDDDDK

SEQ ID NO: 414 - DNA, 1515 bp, Artificial Sequence
  DLL3LH x CD3HL TCRA
atggaaactgatactctgctgctctgggtgctgctgctttgggtgcccggttccaccggggatgaaattgtgatgacccagagccctgcaactttgtctgtttctccaggggagagggccacactttcctgtaaagcttcccagtctgtcagcaatgatgtggtgtggtaccagcagaagccaggacaagcaccccggctactcatctattatgcgagcaacagatatactggaattcctgcccgcttcagtggctcaggttcagggacagagttcaccctgactatatcgtccctgcagagtgaagactttgctgtatactactgccagcaagactacacgagcccctggacatttggccagggcaccaagctggagatcaaaggtggcggtggctcgggcggtggtgggtcgggtggcggcggatctcaggtgcagctggtacagagcggcgcagaagtgaagaagcccggagccagcgttaaagtgtcctgcaaggcctctggctacaccttcaccaactatggcatgaactgggtccggcaggctcctgggcaagggctggagtggatgggctggatcaatacttatacaggtgaaccaacctatgcggatgattttaaaggaagagtgaccatgactacagacacatctacttccacagcatacatggagttgcgcagcctccgatctgatgacactgctgtgtactactgtgccaggattggagacagttcaccgagtgactactgggggcaaggtacgcttgttaccgtctcctcaggcgggggcggctctgaggtgcagctggtggagtctgggggaggcttggtgcagcctggaaagtccctgaaactctcctgtgaggcctctggattcaccttcagcggctatggcatgcactgggtccgccaggctccagggagggggctggagtcggtcgcatacattactagtagtagtattaatatcaaatatgctgacgctgtgaaaggccggttcaccgtctccagagacaatgccaagaacttactgtttctacaaatgaacattctcaagtctgaggacacagccatgtactactgtgcaagattcgactgggacaaaaattactggggccaaggaaccatggtcaccgtctcctcaggcggaggtggttccggtgggggtggtagcggaggtggtgggtcagacatccagatgacccagtctccatcatcactgcctgcctccctgggagacagagtcactatcaattgtcaggccagtcaggacattagcaattatttaaactggtaccagcagaaaccagggaaagctcctaagctcctgatctattatacaaataaattggcagatggagtcccatcaaggttcagtggcagtggttctgggagagattcttctttcactatcagcagcctggaatccgaagatattggatcttattactgtcaacagtattataactatccgtggacgttcggacctggcaccaagctggaaatcaaatga

SEQ ID NO: 415 - protein, 504 aa, Artificial Sequence
  DLL3LH x CD3HL TCRA
METDTLLLWVLLLWVPGSTGDEIVMTQSPATLSVSPGERATLSCKASQSVSNDVVWYQQKPGQAPRLLIYYASNRYTGIPARFSGSGSGTEFTLTISSLQSEDFAVYYCQQDYTSPWTFGQGTKLEIKGGGGSGGGGSGGGGSQVQLVQSGAEVKKPGASVKVSCKASGYTFTNYGMNWVRQAPGQGLEWMGWINTYTGEPTYADDFKGRVTMTTDTSTSTAYMELRSLRSDDTAVYYCARIGDSSPSDYWGQGTLVTVSSGGGGSEVQLVESGGGLVQPGKSLKLSCEASGFTFSGYGMHWVRQAPGRGLESVAYITSSSINIKYADAVKGRFTVSRDNAKNLLFLQMNILKSEDTAMYYCARFDWDKNYWGQGTMVTVSSGGGGSGGGGSGGGGSDIQMTQSPSSLPASLGDRVTINCQASQDISNYLNWYQQKPGKAPKLLIYYTNKLADGVPSRFSGSGSGRDSSFTISSLESEDIGSYYCQQYYNYPWTFGPGTKLEIK

SEQ ID NO: 416 - DNA, 1539 bp, Artificial Sequence
  DLL3LH x CD3HL-FLAG TCRA
atggaaactgatactctgctgctctgggtgctgctgctttgggtgcccggttccaccggggatgaaattgtgatgacccagagccctgcaactttgtctgtttctccaggggagagggccacactttcctgtaaagcttcccagtctgtcagcaatgatgtggtgtggtaccagcagaagccaggacaagcaccccggctactcatctattatgcgagcaacagatatactggaattcctgcccgcttcagtggctcaggttcagggacagagttcaccctgactatatcgtccctgcagagtgaagactttgctgtatactactgccagcaagactacacgagcccctggacatttggccagggcaccaagctggagatcaaaggtggcggtggctcgggcggtggtgggtcgggtggcggcggatctcaggtgcagctggtacagagcggcgcagaagtgaagaagcccggagccagcgttaaagtgtcctgcaaggcctctggctacaccttcaccaactatggcatgaactgggtccggcaggctcctgggcaagggctggagtggatgggctggatcaatacttatacaggtgaaccaacctatgcggatgattttaaaggaagagtgaccatgactacagacacatctacttccacagcatacatggagttgcgcagcctccgatctgatgacactgctgtgtactactgtgccaggattggagacagttcaccgagtgactactgggggcaaggtacgcttgttaccgtctcctcaggcgggggcggctctgaggtgcagctggtggagtctgggggaggcttggtgcagcctggaaagtccctgaaactctcctgtgaggcctctggattcaccttcagcggctatggcatgcactgggtccgccaggctccagggagggggctggagtcggtcgcatacattactagtagtagtattaatatcaaatatgctgacgctgtgaaaggccggttcaccgtctccagagacaatgccaagaacttactgtttctacaaatgaacattctcaagtctgaggacacagccatgtactactgtgcaagattcgactgggacaaaaattactggggccaaggaaccatggtcaccgtctcctcaggcggaggtggttccggtgggggtggtagcggaggtggtgggtcagacatccagatgacccagtctccatcatcactgcctgcctccctgggagacagagtcactatcaattgtcaggccagtcaggacattagcaattatttaaactggtaccagcagaaaccagggaaagctcctaagctcctgatctattatacaaataaattggcagatggagtcccatcaaggttcagtggcagtggttctgggagagattcttctttcactatcagcagcctggaatccgaagatattggatcttattactgtcaacagtattataactatccgtggacgttcggacctggcaccaagctggaaatcaaagattataaagacgatgatgacaagtga

SEQ ID NO: 417 - protein, 512 aa, Artificial Sequence
  DLL3LH x CD3HL-FLAG TCRA
METDTLLLWVLLLWVPGSTGDEIVMTQSPATLSVSPGERATLSCKASQSVSNDVVWYQQKPGQAPRLLIYYASNRYTGIPARFSGSGSGTEFTLTISSLQSEDFAVYYCQQDYTSPWTFGQGTKLEIKGGGGSGGGGSGGGGSQVQLVQSGAEVKKPGASVKVSCKASGYTFTNYGMNWVRQAPGQGLEWMGWINTYTGEPTYADDFKGRVTMTTDTSTSTAYMELRSLRSDDTAVYYCARIGDSSPSDYWGQGTLVTVSSGGGGSEVQLVESGGGLVQPGKSLKLSCEASGFTFSGYGMHWVRQAPGRGLESVAYITSSSINIKYADAVKGRFTVSRDNAKNLLFLQMNILKSEDTAMYYCARFDWDKNYWGQGTMVTVSSGGGGSGGGGSGGGGSDIQMTQSPSSLPASLGDRVTINCQASQDISNYLNWYQQKPGKAPKLLIYYTNKLADGVPSRFSGSGSGRDSSFTISSLESEDIGSYYCQQYYNYPWTFGPGTKLEIKDYKDDDDK

SEQ ID NO: 418 - protein, 531 aa, Artificial Sequence
  MT103 (CD19LH x CD3HL TCRA)
MGWSCIILFLVATATGVHSDYKDDDDKDIQLTQSPASLAVSLGQRATISCKASQSVDYDGDSYLNWYQQIPGQPPKLLIYDASNLVSGIPPRFSGSGSGTDFTLNIHPVEKVDAATYHCQQSTEDPWTFGGGTKLEIKGGGGSGGGGSGGGGSQVQLQQSGAELVRPGSSVKISCKASGYAFSSYWMNWVKQRPGQGLEWIGQIWPGDGDTNYNGKFKGKATLTADESSSTAYMQLSSLASEDSAVYFCARRETTTVGRYYYAMDYWGQGTTVTVSSGGGGSDIKLQQSGAELARPGASVKMSCKTSGYTFTRYTMHWVKQRPGQGLEWIGYINPSRGYTNYNQKFKDKATLTTDKSSSTAYMQLSSLTSEDSAVYYCARYYDDHYCLDYWGQGTTLTVSSVEGGSGGSGGSGGSGGVDDIQLTQSPAIMSASPGEKVTMTCRASSSVSYMNWYQQKSGTSPKRWIYDTSKVASGVPYRFSGSGSGTSYSLTISSMEAEDAATYYCQQWSSNPLTFGAGTKLELKHHHHHH

SEQ ID NO: 419 - DNA, 26 bp, Artificial Sequence
  purm-1 primer
ccagatgtggcttgtttatacttcgc

SEQ ID NO: 420 - DNA, 25 bp, Artificial Sequence
  purm-2 primer
ccttattgctgaatactgccctgag

SEQ ID NO: 421 - DNA, 25 bp, Artificial Sequence
  purm-3 primer
cgtgtcgcaattcttaatgccatag

SEQ ID NO: 422 - DNA, 23 bp, Artificial Sequence
  purm-4 primer
caaacatcggactcagaatacgc

SEQ ID NO: 423 - DNA, 23 bp, Artificial Sequence
  purm-5 primer
caggcgataaaggctaacaaccg

SEQ ID NO: 424 - DNA, 23 bp, Artificial Sequence
  purm-6 primer
ttgacctggatcaaccaaaagcg

SEQ ID NO: 425 - DNA, 21 bp, Artificial Sequence
  acrd-1 primer
cctgcgaccgatactgatgac

SEQ ID NO: 426 - DNA, 20 bp, Artificial Sequence
  acrd-3 primer
gctactcgctacctggatgc

SEQ ID NO: 427 - DNA, 1500 bp, Artificial Sequence
  anti-human CTLA-4 scFv-Fc
atggagacacctgcccagctgctgttcctgctgctgctgtggctgcccgacaccaccggcgagatcgtgctgacccagtctcctggcaccctgagcctgagccccggcgagagagccacactgagctgcagagcttctcagagcgtcggatcttcttatctggcctggtatcagcaaaagcccggacaagctcctcggctgctgatctacggcgccttcagccgggctacaggcatccctgatagattcagcggcagcggctctggcactgatttcaccctgaccattagcagactggaacctgaggacttcgccgtgtactactgccagcagtacgggagcagcccttggacctttggacaaggcaccaaggtggaaatcaagcgtggaggaggcggctcaggcggcggaggaagcggcggcggcggctccggcggcggaggcagccaggttcagctggttgaaagcggaggcggcgtggtccagcctggtagaagcctgcggctgtcttgcgccgccagcggctttacatttagcagctacaccatgcactgggtgcggcaggcccctggcaagggcctggaatgggtcaccttcatcagctacgacggcaacaacaagtactacgccgacagcgtgaaaggcagattcaccatcagcagagataattctaaaaacaccctgtacctgcaaatgaacagcctcagagccgaggataccgctatctactactgtgccagaacaggctggctgggccccttcgactactggggccagggcacactggtgaccgtgtctagcgagcctaagtcttccgataagacacacacctgccctccgtgccccgcccctgaactgctcggcggacctagcgtgttcctgttccctccaaagcctaaggacaccctgatgatctctcgaacacctgaggtgacctgcgtggtggtggacgtgtcccacgaggaccccgaggtgaagttcaactggtacgtggacggcgtggaagtgcacaacgccaagacaaaacctagagaggagcagtacaacagcacctacagagtggtgtccgtgctgaccgtgctgcaccaggactggctgaacggcaaggaatacaagtgcaaggtgtccaacaaggccctgcctgcccctatcgagaagaccatcagcaaggctaaaggccagcccagagagccccaggtgtacacactgcctccaagcagggacgagctgaccaagaaccaggtcagcctgacatgtctggtgaagggcttctacccttctgacatcgccgtggaatgggagagcaacggccagcccgagaacaactacaagacgacccctcctgtgctggacagcgacggatccttcttcctgtacagcaagctgacagttgataagtcccggtggcagcagggcaatgtgtttagctgtagcgtgatgcacgaggccctgcataatcactacacccagaaaagccttagcctgtccccaggcaaatga

SEQ ID NO: 428 - protein, 499 aa, Artificial Sequence
  anti-human CTLA-4 scFv-Fc
METPAQLLFLLLLWLPDTTGEIVLTQSPGTLSLSPGERATLSCRASQSVGSSYLAWYQQKPGQAPRLLIYGAFSRATGIPDRFSGSGSGTDFTLTISRLEPEDFAVYYCQQYGSSPWTFGQGTKVEIKRGGGGSGGGGSGGGGSGGGGSQVQLVESGGGVVQPGRSLRLSCAASGFTFSSYTMHWVRQAPGKGLEWVTFISYDGNNKYYADSVKGRFTISRDNSKNTLYLQMNSLRAEDTAIYYCARTGWLGPFDYWGQGTLVTVSSEPKSSDKTHTCPPCPAPELLGGPSVFLFPPKPKDTLMISRTPEVTCVVVDVSHEDPEVKFNWYVDGVEVHNAKTKPREEQYNSTYRVVSVLTVLHQDWLNGKEYKCKVSNKALPAPIEKTISKAKGQPREPQVYTLPPSRDELTKNQVSLTCLVKGFYPSDIAVEWESNGQPENNYKTTPPVLDSDGSFFLYSKLTVDKSRWQQGNVFSCSVMHEALHNHYTQKSLSLSPGK

SEQ ID NO: 429 - protein, 267 aa, Artificial Sequence
  anti-human CTLA-4 scFv
METPAQLLFLLLLWLPDTTGEIVLTQSPGTLSLSPGERATLSCRASQSVGSSYLAWYQQKPGQAPRLLIYGAFSRATGIPDRFSGSGSGTDFTLTISRLEPEDFAVYYCQQYGSSPWTFGQGTKVEIKRGGGGSGGGGSGGGGSGGGGSQVQLVESGGGVVQPGRSLRLSCAASGFTFSSYTMHWVRQAPGKGLEWVTFISYDGNNKYYADSVKGRFTISRDNSKNTLYLQMNSLRAEDTAIYYCARTGWLGPFDYWGQGTLVTVSS

SEQ ID NO: 430 - protein, 264 aa, Artificial Sequence
  Anti-Mouse CTLA-4 scFv
METDTLLLWVLLLWVPGSTGDIVMTQTTLSLPVSLGDQASISCRSSQSIVHSNGNTYLEWYLQKPGQSPKLLIYKVSNRFSGVPDRFSGSGSGTDFTLKISRVEAEDLGVYYCFQGSHVPYTFGGGTKLEIKGGGGSGGGGSGGGGSEAKLQESGPVLVKPGASVKMSCKASGYTFTDYYMNWVKQSHGKSLEWIGVINPYNGDTSYNQKFKGKATLTVDKSSSTAYMELNSLTSEDSAVYYCARYYGSWFAYWGQGTLVTVSS

SEQ ID NO: 431 - protein, 497 aa, Artificial Sequence
  Anti-Mouse CTLA-4 scFv-Fc
METDTLLLWVLLLWVPGSTGDIVMTQTTLSLPVSLGDQASISCRSSQSIVHSNGNTYLEWYLQKPGQSPKLLIYKVSNRFSGVPDRFSGSGSGTDFTLKISRVEAEDLGVYYCFQGSHVPYTFGGGTKLEIKGGGGSGGGGSGGGGSEAKLQESGPVLVKPGASVKMSCKASGYTFTDYYMNWVKQSHGKSLEWIGVINPYNGDTSYNQKFKGKATLTVDKSSSTAYMELNSLTSEDSAVYYCARYYGSWFAYWGQGTLVTVSSEPRGPTIKPCPPCKCPAPNLLGGPSVFIFPPKIKDVLMISLSPIVTCVVVDVSEDDPDVQISWFVNNVEVHTAQTQTHREDYNSTLRVVSALPIQHQDWMSGKEFKCKVNNKDLPAPIERTISKPKGSVRAPQVYVLPPPEEEMTKKQVTLTCMVTDFMPEDIYVEWTNNGKTELNYKNTEPVLDSDGSYFMYSKLRVEKKNWVERNSYSCSVVHEGLHNHHTTKSFSRTPGK

SEQ ID NO: 432 - DNA, 618 bp, Rickettsia prowazekii
  Phospholipase D gene (pld)
atgaagagcaaaaataataaatttatagcagtatctatctcctttattttgggaatcgctttaggtatttatgtagagagtacttattattttactaatataataaatagcaaatcattttctttatctaatgcacaaataaactattatagtatttcagaactttcaagaagtaatgtgagtacatgttttactccacctgccggttgtactaaatttatagtgcagcagatagagaaagctgaagaatctatttatatgcaggcatatggtatgagcgattcattaattactactgcacttattaatgcacagatgcgaggagtaaaagtgagaatattactcgatcgtagtaatttaaagcagaaattttctaaattatatgaattacaacaagcaaaaattgatgttggcatagatacggtacctggcattgcccataataaagttataattattgataaaaagaaagtaataactggttcgtttaatttcacggtttctgctgataaacgtaatgctgaaaatgtaattcttatagaagatcggaaattagcagagtcttatttacaaaattggttcagtcggaaaacaacgagtaatgcagtacatttttag

SEQ ID NO: 433 - protein, 205 aa, Rickettsia prowazekii
  Phospholipase D (Pld) protein
MKSKNNKFIAVSISFILGIALGIYVESTYYFTNIINSKSFSLSNAQINYYSISELSRSNVSTCFTPPAGCTKFIVQQIEKAEESIYMQAYGMSDSLITTALINAQMRGVKVRILLDRSNLKQKFSKLYELQQAKIDVGIDTVPGIAHNKVIIIDKKKVITGSFNFTVSADKRNAENVILIEDRKLAESYLQNWFSRKTTSNAVHF

SEQ ID NO: 434 - DNA, 547 bp, Artificial Sequence
  VCIP IRES
agaaaacaaacccaggcgatcacagcagcagccgccgcggcagcagcaccaacagcaggaggagcaggaggagccggaggaggaggaggaggaggaggcaaagttagagttggggctggcgctccggagttgctgggctcagcgcagctcccattcattaaggaaccagctgcggaggaaggtggccgagcgcccgcgctgcccactcgctcgctcgcgcactcagacgcgcgccacaacagcgcgccccaagctgcgcagctctgcaaaagtttctgctcgggatctggctctcttccccttggactttagaacgatttagggttgacagaggaaagcagaggcgcgcaggaggagcagaaaacaccaccttctgcagttggaggcaggcagccccggctgcactctagccgccgcgcccggagccggggccgacccgccactatccgcagcagcctcggccaggaggcgacccgggcgcctgggtgtgtggctgctgttgcgggacgtcttcgcggggcgggaggctcgcgccgcagccagcgcc

SEQ ID NO: 435 - protein, 380 aa, Homo sapiens
  Sialidase-2 (Human Neu2)
MASLPVLQKESVFQSGAHAYRIPALLYLPGQQSLLAFAEQRASKKDEHAELIVLRRGDYDAPTHQVQWQAQEVVAQARLDGHRSMNPCPLYDAQTGTLFLFFIAIPGQVTEQQQLQTRANVTRLCQVTSTDHGRTWSSPRDLTDAAIGPAYREWSTFAVGPGHCLQLHDRARSLVVPAYAYRKLHPIQRPIPSAFCFLSHDHGRTWARGHFVAQDTLECQVAEVETGEQRVVTLNARSHLRARVQAQSTNDGLDFQESQLVKKLVEPPPQGCQGSVISFPSPRSGPGSPAQWLLYTHPTHSWQRADLGAYLNPRPPAPEAWSEPVLLAKGSCAYSDLQSMGTGPDGSPLFGCLYEANDYEEIVFLMFTLKQAFPAEYLPQ

SEQ ID NO: 436 - protein, 235 aa, Homo sapiens
  Human FLT-3 Ligand
MTVLAPAWSPTTYLLLLLLLSSGLSGTQDCSFQHSPISSDFAVKIRELSDYLLQDYPVTVASNLQDEELCGGLWRLVLAQRWMERLKTVAGSKMQGLLERVNTEIHFVTKCAFQPPPSCLRFVQTNISRLLQETSEQLVALKPWITRQNFSRCLELQCQPDSSTLPPPWSPRPLEATAPTAPQPPLLLLLLLPVGLLLLAAAWCLHWQRTRRRTPRPGEQVPPVPSPQDLLLVEH

SEQ ID NO: 437 - protein, 391 aa, Artificial Sequence
  Human soluble TGF-beta Receptor II-Fc Fusion (hu sTGFbRII-Fc)
  misc_feature (1)...(159): Human soluble TGF-beta Receptor II
  misc_feature (160)...(391): human IgG1 Fc
MGRGLLRGLWPLHIVLWTRIASTIPPHVQKSVNNDMIVTDNNGAVKFPQLCKFCDVRFSTCDNQKSCMSNCSITSICEKPQEVCVAVWRKNDENITLETVCHDPKLPYHDFILEDAASPKCIMKEKKKPGETFFMCSCSSDECNDNIIFSEEYNTSNPDEPKSCDKTHTCPPCPAPELLGGPSVFLFPPKPKDTLMISRTPEVTCVVVDVSHEDPEVKFNWYVDGVEVHNAKTKPREEQYNSTYRVVSVLTVLHQDWLNGKEYKCKVSNKALPAPIEKTISKAKGQPREPQVYTLPPSRDELTKNQVSLTCLVKGFYPSDIAVEWESNGQPENNYKTTPPVLDSDGSFFLYSKLTVDKSRWQQGNVFSCSVMHEALHNHYTQKSLSLSPGK

SEQ ID NO: 438 - protein, 1273 aa, Severe acute respiratory syndrome coronavirus 2
  SARS-CoV-2 Spike (S) Glycoprotein
MFVFLVLLPLVSSQCVNLTTRTQLPPAYTNSFTRGVYYPDKVFRSSVLHSTQDLFLPFFSNVTWFHAIHVSGTNGTKRFDNPVLPFNDGVYFASTEKSNIIRGWIFGTTLDSKTQSLLIVNNATNVVIKVCEFQFCNDPFLGVYYHKNNKSWMESEFRVYSSANNCTFEYVSQPFLMDLEGKQGNFKNLREFVFKNIDGYFKIYSKHTPINLVRDLPQGFSALEPLVDLPIGINITRFQTLLALHRSYLTPGDSSSGWTAGAAAYYVGYLQPRTFLLKYNENGTITDAVDCALDPLSETKCTLKSFTVEKGIYQTSNFRVQPTESIVRFPNITNLCPFGEVFNATRFASVYAWNRKRISNCVADYSVLYNSASFSTFKCYGVSPTKLNDLCFTNVYADSFVIRGDEVRQIAPGQTGKIADYNYKLPDDFTGCVIAWNSNNLDSKVGGNYNYLYRLFRKSNLKPFERDISTEIYQAGSTPCNGVEGFNCYFPLQSYGFQPTNGVGYQPYRVVVLSFELLHAPATVCGPKKSTNLVKNKCVNFNFNGLTGTGVLTESNKKFLPFQQFGRDIADTTDAVRDPQTLEILDITPCSFGGVSVITPGTNTSNQVAVLYQDVNCTEVPVAIHADQLTPTWRVYSTGSNVFQTRAGCLIGAEHVNNSYECDIPIGAGICASYQTQTNSPRRARSVASQSIIAYTMSLGAENSVAYSNNSIAIPTNFTISVTTEILPVSMTKTSVDCTMYICGDSTECSNLLLQYGSFCTQLNRALTGIAVEQDKNTQEVFAQVKQIYKTPPIKDFGGFNFSQILPDPSKPSKRSFIEDLLFNKVTLADAGFIKQYGDCLGDIAARDLICAQKFNGLTVLPPLLTDEMIAQYTSALLAGTITSGWTFGAGAALQIPFAMQMAYRFNGIGVTQNVLYENQKLIANQFNSAIGKIQDSLSSTASALGKLQDVVNQNAQALNTLVKQLSSNFGAISSVLNDILSRLDKVEAEVQIDRLITGRLQSLQTYVTQQLIRAAEIRASANLAATKMSECVLGQSKRVDFCGKGYHLMSFPQSAPHGVVFLHVTYVPAQEKNFTTAPAICHDGKAHFPREGVFVSNGTHWFVTQRNFYEPQIITTDNTFVSGNCDVVIGIVNNTVYDPLQPELDSFKEELDKYFKNHTSPDVDLGDISGINASVVNIQKEIDRLNEVAKNLNESLIDLQELGKYEQYIKWPWYIWLGFIAGLIAIVMVTIMLCCMTSCCSCLKGCCSCGSCCKFDEDDSEPVLKGVKLHYT

SEQ ID NO: 439 - DNA, 3822 bp, Severe acute respiratory syndrome coronavirus 2
  SARS-CoV-2 glycoprotein
atgtttgtttttcttgttttattgccactagtctctagtcagtgtgttaatcttacaaccagaactcaattaccccctgcatacactaattctttcacacgtggtgtttattaccctgacaaagttttcagatcctcagttttacattcaactcaggacttgttcttacctttcttttccaatgttacttggttccatgctatacatgtctctgggaccaatggtactaagaggtttgataaccctgtcctaccatttaatgatggtgtttattttgcttccactgagaagtctaacataataagaggctggatttttggtactactttagattcgaagacccagtccctacttattgttaataacgctactaatgttgttattaaagtctgtgaatttcaattttgtaatgatccatttttgggtgtttattaccacaaaaacaacaaaagttggatggaaagtgagttcagagtttattctagtgcgaataattgcacttttgaatatgtctctcagccttttcttatggaccttgaaggaaaacagggtaatttcaaaaatcttagggaatttgtgtttaagaatattgatggttattttaaaatatattctaagcacacgcctattaatttagtgcgtgatctccctcagggtttttcggctttagaaccattggtagatttgccaataggtattaacatcactaggtttcaaactttacttgctttacatagaagttatttgactcctggtgattcttcttcaggttggacagctggtgctgcagcttattatgtgggttatcttcaacctaggacttttctattaaaatataatgaaaatggaaccattacagatgctgtagactgtgcacttgaccctctctcagaaacaaagtgtacgttgaaatccttcactgtagaaaaaggaatctatcaaacttctaactttagagtccaaccaacagaatctattgttagatttcctaatattacaaacttgtgcccttttggtgaagtttttaacgccaccagatttgcatctgtttatgcttggaacaggaagagaatcagcaactgtgttgctgattattctgtcctatataattccgcatcattttccacttttaagtgttatggagtgtctcctactaaattaaatgatctctgctttactaatgtctatgcagattcatttgtaattagaggtgatgaagtcagacaaatcgctccagggcaaactggaaagattgctgattataattataaattaccagatgattttacaggctgcgttatagcttggaattctaacaatcttgattctaaggttggtggtaattataattacctgtatagattgtttaggaagtctaatctcaaaccttttgagagagatatttcaactgaaatctatcaggccggtagcacaccttgtaatggtgttgaaggttttaattgttactttcctttacaatcatatggtttccaacccactaatggtgttggttaccaaccatacagagtagtagtactttcttttgaacttctacatgcaccagcaactgtttgtggacctaaaaagtctactaatttggttaaaaacaaatgtgtcaatttcaacttcaatggtttaacaggcacaggtgttcttactgagtctaacaaaaagtttctgcctttccaacaatttggcagagacattgctgacactactgatgctgtccgtgatccacagacacttgagattcttgacattacaccatgttcttttggtggtgtcagtgttataacaccaggaacaaatacttctaaccaggttgctgttctttatcaggatgttaactgcacagaagtccctgttgctattcatgcagatcaacttactcctacttggcgtgtttattctacaggttctaatgtttttcaaacacgtgcaggctgtttaataggggctgaacatgtcaacaactcatatgagtgtgacatacccattggtgcaggtatatgcgctagttatcagactcagactaattctcctcggcgggcacgtagtgtagctagtcaatccatcattgcctacactatgtcacttggtgcagaaaattcagttgcttactctaataactctattgccatacccacaaattttactattagtgttaccacagaaattctaccagtgtctatgaccaagacatcagtagattgtacaatgtacatttgtggtgattcaactgaatgcagcaatcttttgttgcaatatggcagtttttgtacacaattaaaccgtgctttaactggaatagctgttgaacaagacaaaaacacccaagaagtttttgcacaagtcaaacaaatttacaaaacaccaccaattaaagattttggtggttttaatttttcacaaatattaccagatccatcaaaaccaagcaagaggtcatttattgaagatctacttttcaacaaagtgacacttgcagatgctggcttcatcaaacaatatggtgattgccttggtgatattgctgctagagacctcatttgtgcacaaaagtttaacggccttactgttttgccacctttgctcacagatgaaatgattgctcaatacacttctgcactgttagcgggtacaatcacttctggttggacctttggtgcaggtgctgcattacaaataccatttgctatgcaaatggcttataggtttaatggtattggagttacacagaatgttctctatgagaaccaaaaattgattgccaaccaatttaatagtgctattggcaaaattcaagactcactttcttccacagcaagtgcacttggaaaacttcaagatgtggtcaaccaaaatgcacaagctttaaacacgcttgttaaacaacttagctccaattttggtgcaatttcaagtgttttaaatgatatcctttcacgtcttgacaaagttgaggctgaagtgcaaattgataggttgatcacaggcagacttcaaagtttgcagacatatgtgactcaacaattaattagagctgcagaaatcagagcttctgctaatcttgctgctactaaaatgtcagagtgtgtacttggacaatcaaaaagagttgatttttgtggaaagggctatcatcttatgtccttccctcagtcagcacctcatggtgtagtcttcttgcatgtgacttatgtccctgcacaagaaaagaacttcacaactgctcctgccatttgtcatgatggaaaagcacactttcctcgtgaaggtgtctttgtttcaaatggcacacactggtttgtaacacaaaggaatttttatgaaccacaaatcattactacagacaacacatttgtgtctggtaactgtgatgttgtaataggaattgtcaacaacacagtttatgatcctttgcaacctgaattagactcattcaaggaggagttagataaatattttaagaatcatacatcaccagatgttgatttaggtgacatctctggcattaatgcttcagttgtaaacattcaaaaagaaattgaccgcctcaatgaggttgccaagaatttaaatgaatctctcatcgatctccaagaacttggaaagtatgagcagtatataaaatggccatggtacatttggctaggttttatagctggcttgattgccatagtaatggtgacaattatgctttgctgtatgaccagttgctgtagttgtctcaagggctgttgttcttgtggatcctgctgcaaatttgatgaagacgactctgagccagtgctcaaaggagtcaaattacattacacataa

SEQ ID NO: 440 - protein, 223 aa, Artificial Sequence
  Receptor Binding Domain (RBD) of SARS-CoV-2 Spike Protein
RVQPTESIVRFPNITNLCPFGEVFNATRFASVYAWNRKRISNCVADYSVLYNSASFSTFKCYGVSPTKLNDLCFTNVYADSFVIRGDEVRQIAPGQTGKIADYNYKLPDDFTGCVIAWNSNNLDSKVGGNYNYLYRLFRKSNLKPFERDISTEIYQAGSTPCNGVEGFNCYFPLQSYGFQPTNGVGYQPYRVVVLSFELLHAPATVCGPKKSTNLVKNKCVNF

SEQ ID NO: 441 - protein, 38 aa, Artificial Sequence
  Portion of SARS-CoV-2 Spike Protein Receptor Binding Domain (RBD)
CYFPLQSYGFQPTNGVGYQPYRVVVLSFELLHAPATVC

SEQ ID NO: 442 - protein, 991 aa, Porphyromonas gingivalis
  Gingipain R1 (Arginine-gingipain A or RgpA; UniProt Accession No.: P28784)
MKNLNKFVSIALCSSLLGGMAFAQQTELGRNPNVRLLESTQQSVTKVQFRMDNLKFTEVQTPKGMAQVPTYTEGVNLSEKGMPTLPILSRSLAVSDTREMKVEVVSSKFIEKKNVLIAPSKGMIMRNEDPKKIPYVYGKSYSQNKFFPGEIATLDDPFILRDVRGQVVNFAPLQYNPVTKTLRIYTEITVAVSETSEQGKNILNKKGTFAGFEDTYKRMFMNYEPGRYTPVEEKQNGRMIVIVAKKYEGDIKDFVDWKNQRGLRTEVKVAEDIASPVTANAIQQFVKQEYEKEGNDLTYVLLVGDHKDIPAKITPGIKSDQVYGQIVGNDHYNEVFIGRFSCESKEDLKTQIDRTIHYERNITTEDKWLGQALCIASAEGGPSADNGESDIQHENVIANLLTQYGYTKIIKCYDPGVTPKNIIDAFNGGISLVNYTGHGSETAWGTSHFGTTHVKQLTNSNQLPFIFDVACVNGDFLFSMPCFAEALMRAQKDGKPTGTVAIIASTINQSWASPMRGQDEMNEILCEKHPNNIKRTFGGVTMNGMFAMVEKYKKDGEKMLDTWTVFGDPSLLVRTLVPTKMQVTAPAQINLTDASVNVSCDYNGAIATISANGKMFGSAVVENGTATINLTGLTNESTLTLTVVGYNKETVIKTINTNGEPNPYQPVSNLTATTQGQKVTLKWDAPSTKTNATTNTARSVDGIRELVLLSVSDAPELLRSGQAEIVLEAHDVWNDGSGYQILLDADHDQYGQVIPSDTHTLWPNCSVPANLFAPFEYTVPENADPSCSPTNMIMDGTASVNIPAGTYDFAIAAPQANAKIWIAGQGPTKEDDYVFEAGKKYHFLMKKMGSGDGTELTISEGGGSDYTYTVYRDGTKIKEGLTETTYRDAGMSAQSHEYCVEVKYAAGVSPKVCVDYIPDGVADVTAQKPYTLTVVGKTITVTCQGEAMIYDMNGRRLAAGRNTVVYTAQGGYYAVMVVVDGKSYVEKLAVK

SEQ ID NO: 443 - protein, 736 aa, Porphyromonas gingivalis
  Gingipain R2 (Arginine-gingipain B or RgpB; UniProt Accession No.: P95493)
MKKNFSRIVSIVAFSSLLGGMAFAQPAERGRNPQVRLLSAEQSMSKVQFRMDNLQFTGVQTSKGVAQVPTFTEGVNISEKGTPILPILSRSLAVSETRAMKVEVVSSKFIEKKDVLIAPSKGVISRAENPDQIPYVYGQSYNEDKFFPGEIATLSDPFILRDVRGQVVNFAPLQYNPVTKTLRIYTEIVVAVSETAEAGQNTISLVKNSTFTGFEDIYKSVFMNYEATRYTPVEEKENGRMIVIVPKKYEEDIEDFVDWKNQRGLRTEVKVAEDIASPVTANAIQQFVKQEYEKEGNDLTYVLLVGDHKDIPAKITPGIKSDQVYGQIVGNDHYNEVFIGRFSCESKEDLKTQIDRTIHYERNITTEDKWLGQALCIASAEGGPSADNGESDIQHENIIANLLTQYGYTKIIKCYDPGVTPKNIIDAFNGGISLANYTGHGSETAWGTSHFGTTHVKQLTNSNQLPFIFDVACVNGDFLYNVPCFAEALMRAQKDGKPTGTVAIIASTINQSWASPMRGQDEMNEILCEKHPNNIKRTFGGVTMNGMFAMVEKYKKDGEKMLDTWTVFGDPSLLVRTLVPTKMQVTAPANISASAQTFEVACDYNGAIATLSDDGDMVGTAIVKDGKAIIKLNESIADETNLTLTVVGYNKVTVIKDVKVEGTSIADVANDKPYTVAVSGKTITVESPAAGLTIFDMNGRRVATAKNRMVFEAQNGVYAVRIATEGKTYTEKVIVK

SEQ ID NO: 444 - protein, 1723 aa, Porphyromonas gingivalis
  Lysine-gingipain (Kgp) from  Porphyromonas gingivalis strain ATCC 33277 (UniProt Accession No. B2RLK2
MRKLLLLIAASLLGVGLYAQSAKIKLDAPTTRTTCTNNSFKQFDASFSFNEVELTKVETKGGTFASVSIPGAFPTGEVGSPEVPAVRKLIAVPVGATPVVRVKSFTEQVYSLNQYGSEKLMPHQPSMSKSDDPEKVPFVYNAAAYARKGFVGQELTQVEMLGTMRGVRIAALTINPVQYDVVANQLKVRNNIEIEVSFQGADEVATQRLYDASFSPYFETAYKQLFNRDVYTDHGDLYNTPVRMLVVAGAKFKEALKPWLTWKAQKGFYLDVHYTDEAEVGTTNASIKAFIHKKYNDGLAASAAPVFLALVGDTDVISGEKGKKTKKVTDLYYSAVDGDYFPEMYTFRMSASSPEELTNIIDKVLMYEKATMPDKSYLEKALLIAGADSYWNPKIGQQTIKYAVQYYYNQDHGYTDVYSYPKAPYTGCYSHLNTGVGFANYTAHGSETSWADPSLTATQVKALTNKDKYFLAIGNCCVTAQFDYPQPCFGEVMTRVKEKGAYAYIGSSPNSYWGEDYYWSVGANAVFGVQPTFEGTSMGSYDATFLEDSYNTVNSIMWAGNLAATHAGNIGNITHIGAHYYWEAYHVLGDGSVMPYRAMPKTNTYTLPASLPQNQASYSIQASAGSYVAISKDGVLYGTGVANASGVATVNMTKQITENGNYDVVITRSNYLPVIKQIQAGEPSPYQPVSNLTATTQGQKVTLKWDAPSAKKAEASREVKRIGDGLFVTIEPANDVRANEAKVVLAADNVWGDNTGYQFLLDADHNTFGSVIPATGPLFTGTASSNLYSANFEYLIPANADPVVTTQNIIVTGQGEVVIPGGVYDYCITNPEPASGKMWIAGDGGNQPARYDDFTFEAGKKYTFTMRRAGMGDGTDMEVEDDSPASYTYTVYRDGTKIQEGLTATTFEEDGVAAGNHEYCVEVKYTAGVSPKVCKDVTVEGSNEFAPVQNLTGSAVGQKVTLKWDAPNGTPNPNPNPNPGTTTLSESFENGIPASWKTIDADGDGHGWKPGNAPGIAGYNSNGCVYSESFGLGGIGVLTPDNYLITPALDLPNGGKLTFWVCAQDANYASEHYAVYASSTGNDASNFTNALLEETITAKGVRSPEAIRGRIQGTWRQKTVDLPAGTKYVAFRHFQSTDMFYIDLDEVEIKANGKRADFTETFESSTHGEAPAEWTTIDADGDGQDWLCLSSGQLDWLTAHGGTNVVASFSWNGMALNPDNYLISKDVTGATKVKYYYAVNDGFPGDHYAVMISKTGTNAGDFTVVFEETPNGINKGGARFGLSTEANGAKPQSVWIERTVDLPAGTKYVAFRHYNCSDLNYILLDDIQFTMGGSPTPTDYTYTVYRDGTKIKEGLTETTFEEDGVATGNHEYCVEVKYTAGVSPKVCVNVTINPTQFNPVKNLKAQPDGGDVVLKWEAPSGKRGELLNEDFEGDAIPTGWTALDADGDGNNWDITLNEFTRGERHVLSPLRASNVAISYSSLLQGQEYLPLTPNNFLITPKVEGAKKITYKVGSPGLPQWSHDHYALCISKSGTAAADFEVIFEETMTYTQGGANLTREKDLPAGTKYVAFRHYNCTDVLGIMIDDVVITGEGEGPSYTYTVYRDGTKIQEGLTETTYRDAGMSAQSHEYCVEVKYAAGVSPKVCVDYIPDGVADVTAQKPYTLTVVGKTITVTCQGEAMIYDMNGRRLAAGRNTVVYTAQGGYYAVMVVVDGKSYVEKLAIK

SEQ ID NO: 445 - protein, 1732 aa, Porphyromonas gingivalis
  Lysine-gingipain W83 (UniProt Accession No.: Q51817)
MRKLLLLIAASLLGVGLYAQSAKIKLDAPTTRTTCTNNSFKQFDASFSFNEVELTKVETKGGTFASVSIPGAFPTGEVGSPEVPAVRKLIAVPVGATPVVRVKSFTEQVYSLNQYGSEKLMPHQPSMSKSDDPEKVPFVYNAAAYARKGFVGQELTQVEMLGTMRGVRIAALTINPVQYDVVANQLKVRNNIEIEVSFQGADEVATQRLYDASFSPYFETAYKQLFNRDVYTDHGDLYNTPVRMLVVAGAKFKEALKPWLTWKAQKGFYLDVHYTDEAEVGTTNASIKAFIHKKYNDGLAASAAPVFLALVGDTDVISGEKGKKTKKVTDLYYSAVDGDYFPEMYTFRMSASSPEELTNIIDKVLMYEKATMPDKSYLEKVLLIAGADYSWNSQVGQPTIKYGMQYYYNQEHGYTDVYNYLKAPYTGCYSHLNTGVSFANYTAHGSETAWADPLLTTSQLKALTNKDKYFLAIGNCCITAQFDYVQPCFGEVITRVKEKGAYAYIGSSPNSYWGEDYYWSVGANAVFGVQPTFEGTSMGSYDATFLEDSYNTVNSIMWAGNLAATHAGNIGNITHIGAHYYWEAYHVLGDGSVMPYRAMPKTNTYTLPASLPQNQASYSIQASAGSYVAISKDGVLYGTGVANASGVATVSMTKQITENGNYDVVITRSNYLPVIKQIQVGEPSPYQPVSNLTATTQGQKVTLKWEAPSAKKAEGSREVKRIGDGLFVTIEPANDVRANEAKVVLAADNVWGDNTGYQFLLDADHNTFGSVIPATGPLFTGTASSNLYSANFEYLVPANADPVVTTQNIIVTGQGEVVIPGGVYDYCITNPEPASGKMWIAGDGGNQPARYDDFTFEAGKKYTFTMRRAGMGDGTDMEVEDDSPASYTYTVYRDGTKIKEGLTATTFEEDGVAAGNHEYCVEVKYTAGVSPKVCKDVTVEGSNEFAPVQNLTGSSVGQKVTLKWDAPNGTPNPNPNPNPNPGTTLSESFENGIPASWKTIDADGDGHGWKPGNAPGIAGYNSNGCVYSESFGLGGIGVLTPDNYLITPALDLPNGGKLTFWVCAQDANYASEHYAVYASSTGNDASNFTNALLEETITAKGVRSPKAIRGRIQGTWRQKTVDLPAGTKYVAFRHFQSTDMFYIDLDEVEIKANGKRADFTETFESSTHGEAPAEWTTIDADGDGQGWLCLSSGQLDWLTAHGGSNVVSSFSWNGMALNPDNYLISKDVTGATKVKYYYAVNDGFPGDHYAVMISKTGTNAGDFTVVFEETPNGINKGGARFGLSTEANGAKPQSVWIERTVDLPAGTKYVAFRHYNCSDLNYILLDDIQFTMGGSPTPTDYTYTVYRDGTKIKEGLTETTFEEDGVATGNHEYCVEVKYTAGVSPKKCVDVTVNSTQFNPVQNLTAEQAPNSMDAILKWNAPASKRAEVLNEDFENGIPASWKTIDADGDGNNWTTTPPPGGSSFAGHNSAICVSSASHINFEGPQNPDNYLVTPELSLPGGGTLTFWVCAQDANYASEHYAVYASSTGNDASNFANALLEEVLTAKTVVTAPEAIRGTRAQGTWYQKTVQLPAGTKYVAFRHFGCTDFFWINLDDVVITSGNAPSYTYTIYRNNTQIASGVTETTYRDPDLATGFYTYGVKVVYPNGESAIETATLNITSLADVTAQKPYTLTVVGKTITVTCQGEAMIYDMNGRRLAAGRNTVVYTAQGGHYAVMVVVDGKSYVEKLAVK

SEQ ID NO: 446 - protein, 1723 aa, Porphyromonas gingivalis; identical to SEQ ID NO: 444
  Lysine-gingipain 381 (UniProt Accession No.: P72194)

SEQ ID NO: 447 - protein, 1723 aa, Porphyromonas gingivalis
  Lysine-gingipain HG66 (UniProt Accession No.: P72197)
MRKLLLLIAASLLGVGLYAQNAKIKLDAPTTRTTCTNNSFKQFDASFSFNEVELTKVETKGGTFASVSIPGAFPTGEVGSPEVPAVRKLIAVPVGATPVVRVKSFTEQVYSLNQYGSEKLMPHQPSMSKSDDPEKVPFAYNAAAYARKGFVGQELTQVEMLGTMRGVRIAALTINPVQYDVVANQLKVRNNIEIEVSFQGADEVATQRLYDASFSPYFETAYKQLFNRDVYTDHGDLYNTPVRMLVVAGAKFKEALKPWLTWKAQKGFYLDVHYTDEAEVGTTNASIKAFIHKKYNDGLAASAAPVFLALVGDTDVISGEKGKKTKKVTDLYYSAVDGDYFPEMYTFRMSASSPEELTNIIDKVLMYEKATMPDKSYLEKALLIAGADSYWNPKIGQQTIKYAVQYYYNQDHGYTDVYSYPKAPYTGCYSHLNTGVGFANYTAHGSETSWADPSVTATQVKALTNKNKYFLAIGNCCVTAQFDYPQPCFGEVMTRVKEKGAYAYIGSSPNSYWGEDYYWSVGANAVFGVQPTFEGTSMGSYDATFLEDSYNTVNSIMWAGNLAATHAENIGNVTHIGAHYYWEAYHVLGDGSVMPYRAMPKTNTYTLPASLPQNQASYSIQASAGSYVAISKDGVLYGTGVANASGVATVNMTKQITENGNYDVVITRSNYLPVIKQIQAGEPSPYQPVSNLTATTQGQKVTLKWDAPSAKKAEGSREVKRIGDGLFVTIEPANDVRANEAKVVLAADNVWGDNTGYQFLLDADHNTFGSVIPATGPLFTGTASSNLYSANFEYLIPANADPVVTTQNIIVTGQGEVVIPGGVYDYCITNPEPASGKMWIAGDGGNQPARYDDFTFEAGKKYTFTMRRAGMGDGTDMEVEDDSPASYTYTVYRDGTKIKEGLTATTFEEDGVAAGNHEYCVEVKYTAGVSPKVCKDVTVEGSNEFAPVQNLTGSAVGQKVTLKWDAPNGTPNPNPNPNPGTTTLSESFENGIPASWKTIDADGDGHGWKPGNAPGIAGYNSNGCVYSESFGLGGIGVLTPDNYLITPALDLPNGGKLTFWVCAQDANYASEHYAVYASSTGNDASNFTNALLEETITAKGVRSPEAIRGRIQGTWRQKTVDLPAGTKYVAFRHFQSTDMFYIDLDEVEIKANGKRADFTETFESSTHGEAPAEWTTIDADGDGQGWLCLSSGQLDWLTAHGGTNVVASFSWNGMALNPDNYLISKDVTGATKVKYYYAVNDGFPGDHYAVMISKTGTNAGDFTVVFEETPNGINKGGARFGLSTEADGAKPQSVWIERTVDLPAGTKYVAFRHYNCSDLNYILLDDIQFTMGGSPTPTDYTYTVYRDGTKIKEGLTETTFEEDGVATGNHEYCVEVKYTAGVSPKKCVNVTINPTQFNPVKNLKAQPDGGDVVLKWEAPSAKKAEGSREVKRIGDGLFVTIEPANDVRANEAKVVLAADNVWGDNTGYQFLLDADHNTFGSVIPATGPLFTGTASSNLYSANFEYLIPANADPVVTTQNIIVTGQGEVVIPGGVYDYCITNPEPASGKMWIAGDGGNQPARYDDFTFEAGKKYTFTMRRAGMGDGTDMEVEDDSPASYTYTVYRDGTKIKEGLTETTYRDAGMSAQSHEYCVEVKYAAGVSPKVCVDYIPDGVADVTAQKPYTLTVVGKTITVTCQGEAMIYDMNGRRLAAGRNTVVYTAQGGYYAVMVVVDGKSYVEKLAVK

SEQ ID NO: 448 - DNA, 828 bp, Severe acute respiratory syndrome coronavirus 2
  ORF3a
atggatttgtttatgagaatcttcacaattggaactgtaactttgaagcaaggtgaaatcaaggatgctactccttcagattttgttcgcgctactgcaacgataccgatacaagcctcactccctttcggatggcttattgttggcgttgcacttcttgctgtttttcagagcgcttccaaaatcataaccctcaaaaagagatggcaactagcactctccaagggtgttcactttgtttgcaacttgctgttgttgtttgtaacagtttactcacaccttttgctcgttgctgctggccttgaagccccttttctctatctttatgctttagtctacttcttgcagagtataaactttgtaagaataataatgaggctttggctttgctggaaatgccgttccaaaaacccattactttatgatgccaactattttctttgctggcatactaattgttacgactattgtataccttacaatagtgtaacttcttcaattgtcattacttcaggtgatggcacaacaagtcctatttctgaacatgactaccagattggtggttatactgaaaaatgggaatctggagtaaaagactgtgttgtattacacagttacttcacttcagactattaccagctgtactcaactcaattgagtacagacactggtgttgaacatgttaccttcttcatctacaataaaattgttgatgagcctgaagaacatgtccaaattcacacaatcgacggttcatccggagttgttaatccagtaatggaaccaatttatgatgaaccgacgacgactactagcgtgcctttgtaa

SEQ ID NO: 449 - protein, 275 aa, Severe acute respiratory syndrome coronavirus 2
  ORF3a
MDLFMRIFTIGTVTLKQGEIKDATPSDFVRATATIPIQASLPFGWLIVGVALLAVFQSASKIITLKKRWQLALSKGVHFVCNLLLLFVTVYSHLLLVAAGLEAPFLYLYALVYFLQSINFVRIIMRLWLCWKCRSKNPLLYDANYFLCWHTNCYDYCIPYNSVTSSIVITSGDGTTSPISEHDYQIGGYTEKWESGVKDCVVLHSYFTSDYYQLYSTQLSTDTGVEHVTFFIYNKIVDEPEEHVQIHTIDGSSGVVNPVMEPIYDEPTTTTSVPL

SEQ ID NO: 450 - DNA, 228 bp, Severe acute respiratory syndrome coronavirus 2
  Envelope (E)
atgtactcattcgtttcggaagagacaggtacgttaatagttaatagcgtacttctttttcttgctttcgtggtattcttgctagttacactagccatccttactgcgcttcgattgtgtgcgtactgctgcaatattgttaacgtgagtcttgtaaaaccttctttttacgtttactctcgtgttaaaaatctgaattcttctagagttcctgatcttctggtctaa

SEQ ID NO: 451 - protein, 75 aa, Severe acute respiratory syndrome coronavirus 2
  Envelope (E)
MYSFVSEETGTLIVNSVLLFLAFVVFLLVTLAILTALRLCAYCCNIVNVSLVKPSFYVYSRVKNLNSSRVPDLLV

SEQ ID NO: 452 - DNA, 669 bp, Severe acute respiratory syndrome coronavirus 2
  Membrane (M)
atggcagattccaacggtactattaccgttgaagagcttaaaaagctccttgaacaatggaacctagtaataggtttcctattccttacatggatttgtcttctacaatttgcctatgccaacaggaataggtttttgtatataattaagttaattttcctctggctgttatggccagtaactttagcttgttttgtgcttgctgctgtttacagaataaattggatcaccggtggaattgctatcgcaatggcttgtcttgtaggcttgatgtggctcagctacttcattgcttctttcagactgtttgcgcgtacgcgttccatgtggtcattcaatccagaaactaacattcttctcaacgtgccactccatggcactattctgaccagaccgcttctagaaagtgaactcgtaatcggagctgtgatccttcgtggacatcttcgtattgctggacaccatctaggacgctgtgacatcaaggacctgcctaaagaaatcactgttgctacatcacgaacgctttcttattacaaattgggagcttcgcagcgtgtagcaggtgactcaggttttgctgcatacagtcgctacaggattggcaactataaattaaacacagaccattccagtagcagtgacaatattgctttgcttgtacagtaa

SEQ ID NO: 453 - protein, 222 aa, Severe acute respiratory syndrome coronavirus 2
  Membrane (M)
MADSNGTITVEELKKLLEQWNLVIGFLFLTWICLLQFAYANRNRFLYIIKLIFLWLLWPVTLACFVLAAVYRINWITGGIAIAMACLVGLMWLSYFIASFRLFARTRSMWSFNPETNILLNVPLHGTILTRPLLESELVIGAVILRGHLRIAGHHLGRCDIKDLPKEITVATSRTLSYYKLGASQRVAGDSGFAAYSRYRIGNYKLNTDHSSSSDNIALLVQ

SEQ ID NO: 454 - DNA, 186 bp, Severe acute respiratory syndrome coronavirus 2
  ORF6
atgtttcatctcgttgactttcaggttactatagcagagatattactaattattatgaggacttttaaagtttccatttggaatcttgattacatcataaacctcataattaaaaatttatctaagtcactaactgagaataaatattctcaattagatgaagagcaaccaatggagattgattaa

SEQ ID NO: 455 - protein, 61 aa, Severe acute respiratory syndrome coronavirus 2
  ORF6
MFHLVDFQVTIAEILLIIMRTFKVSIWNLDYIINLIIKNLSKSLTENKYSQLDEEQPMEID

SEQ ID NO: 456 - DNA, 366 bp, Severe acute respiratory syndrome coronavirus 2
  ORF7a
atgaaaattattcttttcttggcactgataacactcgctacttgtgagctttatcactaccaagagtgtgttagaggtacaacagtacttttaaaagaaccttgctcttctggaacatacgagggcaattcaccatttcatcctctagctgataacaaatttgcactgacttgctttagcactcaatttgcttttgcttgtcctgacggcgtaaaacacgtctatcagttacgtgccagatcagtttcacctaaactgttcatcagacaagaggaagttcaagaactttactctccaatttttcttattgttgcggcaatagtgtttataacactttgcttcacactcaaaagaaagacagaatga

SEQ ID NO: 457 - protein, 121 aa, Severe acute respiratory syndrome coronavirus 2
  ORF7a
MKIILFLALITLATCELYHYQECVRGTTVLLKEPCSSGTYEGNSPFHPLADNKFALTCFSTQFAFACPDGVKHVYQLRARSVSPKLFIRQEEVQELYSPIFLIVAAIVFITLCFTLKRKTE

SEQ ID NO: 458 - DNA, 132 bp, Severe acute respiratory syndrome coronavirus 2
  ORF7b
atgattgaactttcattaattgacttctatttgtgctttttagcctttctgctattccttgttttaattatgcttattatcttttggttctcacttgaactgcaagatcataatgaaacttgtcacgcctaa

SEQ ID NO: 459 - protein, 43 aa, Severe acute respiratory syndrome coronavirus 2
  ORF7b
MIELSLIDFYLCFLAFLLFLVLIMLIIFWFSLELQDHNETCHA

SEQ ID NO: 460 - DNA, 366 bp, Severe acute respiratory syndrome coronavirus 2
  ORF8
atgaaatttcttgttttcttaggaatcatcacaactgtagctgcatttcaccaagaatgtagtttacagtcatgtactcaacatcaaccatatgtagttgatgacccgtgtcctattcacttctattctaaatggtatattagagtaggagctagaaaatcagcacctttaattgaattgtgcgtggatgaggctggttctaaatcacccattcagtacatcgatatcggtaattatacagtttcctgtttaccttttacaattaattgccaggaacctaaattgggtagtcttgtagtgcgttgttcgttctatgaagactttttagagtatcatgacgttcgtgttgttttagatttcatctaa

SEQ ID NO: 461 - protein, 121 aa, Severe acute respiratory syndrome coronavirus 2
  ORF8
MKFLVFLGIITTVAAFHQECSLQSCTQHQPYVVDDPCPIHFYSKWYIRVGARKSAPLIELCVDEAGSKSPIQYIDIGNYTVSCLPFTINCQEPKLGSLVVRCSFYEDFLEYHDVRVVLDFI

SEQ ID NO: 462 - DNA, 1260 bp, Severe acute respiratory syndrome coronavirus 2
  Nucleocapsid (N)
atgtctgataatggaccccaaaatcagcgaaatgcaccccgcattacgtttggtggaccctcagattcaactggcagtaaccagaatggagaacgcagtggggcgcgatcaaaacaacgtcggccccaaggtttacccaataatactgcgtcttggttcaccgctctcactcaacatggcaaggaagaccttaaattccctcgaggacaaggcgttccaattaacaccaatagcagtccagatgaccaaattggctactaccgaagagctaccagacgaattcgtggtggtgacggtaaaatgaaagatctcagtccaagatggtatttctactacctaggaactgggccagaagctggacttccctatggtgctaacaaagacggcatcatatgggttgcaactgagggagccttgaatacaccaaaagatcacattggcacccgcaatcctgctaacaatgctgcaatcgtgctacaacttcctcaaggaacaacattgccaaaaggcttctacgcagaagggagcagaggcggcagtcaagcctcttctcgttcctcatcacgtagtcgcaacagttcaagaaattcaactccaggcagcagtaggggaacttctcctgctagaatggctggcaatggcggtgatgctgctcttgctttgctgctgcttgacagattgaaccagcttgagagcaaaatgtctggtaaaggccaacaacaacaaggccaaactgtcactaagaaatctgctgctgaggcttctaagaagcctcggcaaaaacgtactgccactaaagcatacaatgtaacacaagctttcggcagacgtggtccagaacaaacccaaggaaattttggggaccaggaactaatcagacaaggaactgattacaaacattggccgcaaattgcacaatttgcccccagcgcttcagcgttcttcggaatgtcgcgcattggcatggaagtcacaccttcgggaacgtggttgacctacacaggtgccatcaaattggatgacaaagatccaaatttcaaagatcaagtcattttgctgaataagcatattgacgcatacaaaacattcccaccaacagagcctaaaaaggacaaaaagaagaaggctgatgaaactcaagccttaccgcagagacagaagaaacagcaaactgtgactcttcttcctgctgcagatttggatgatttctccaaacaattgcaacaatccatgagcagtgctgactcaactcaggcctaa

SEQ ID NO: 463 - protein, 419 aa, Severe acute respiratory syndrome coronavirus 2
  Nucleocapsid (N)
MSDNGPQNQRNAPRITFGGPSDSTGSNQNGERSGARSKQRRPQGLPNNTASWFTALTQHGKEDLKFPRGQGVPINTNSSPDDQIGYYRRATRRIRGGDGKMKDLSPRWYFYYLGTGPEAGLPYGANKDGIIWVATEGALNTPKDHIGTRNPANNAAIVLQLPQGTTLPKGFYAEGSRGGSQASSRSSSRSRNSSRNSTPGSSRGTSPARMAGNGGDAALALLLLDRLNQLESKMSGKGQQQQGQTVTKKSAAEASKKPRQKRTATKAYNVTQAFGRRGPEQTQGNFGDQELIRQGTDYKHWPQIAQFAPSASAFFGMSRIGMEVTPSGTWLTYTGAIKLDDKDPNFKDQVILLNKHIDAYKTFPPTEPKKDKKKKADETQALPQRQKKQQTVTLLPAADLDDFSKQLQQSMSSADSTQA

SEQ ID NO: 464 - DNA, 803 bp, Salmonella enterica
  thyA gene
gaggaaccatgaaacagtatttagaactgatgcaaaaagtgctggatgaaggcacacagaaaaacgaccgtaccggcaccggcacgctttccatttttggccatcagatgcgttttaacctgcaggaaggctttcctctggtgacgacgaaacgctgccatttacgttcaattattcacgaactgctatggtttttgcagggcgataccaacatcgcttacctgcacgaaaataatgtcaccatctgggacgaatgggccgatgagaacggcgatttaggcccggtttatggtaagcagtggcgtgcatggccaacaccggatggccgccatatcgatcagatcgccacggtcttaagccagcttaaaaacgacccggactctcgtcgtattatcgtttctgcgtggaacgtcggcgagctggataagatggcgctggcgccgtgtcacgcctttttccagttttatgtcgcagatggaaaactctcctgtcagctttatcagcgctcctgcgatgtgttcctcggtctgccgttcaacattgccagctacgcgttactggtgcatatgatggcgcaacagtgcgacctggacgtcggcgattttgtctggaccggcggcgacacgcacctgtacagcaaccatatggagcagacgcacctgcaattaagccgtgaaccgcgcgcgctgccgaaattggtcattaagcgtaaacccgattcgctttttgactaccggttcgatgatttcgaaattgaaggctatgatccgcaccccggtattaaagcgccggtcgctatctaa

SEQ ID NO: 465 - protein, 264 aa, Salmonella enterica
  thyA
MKQYLELMQKVLDEGTQKNDRTGTGTLSIFGHQMRFNLQEGFPLVTTKRCHLRSIIHELLWFLQGDTNIAYLHENNVTIWDEWADENGDLGPVYGKQWRAWPTPDGRHIDQIATVLSQLKNDPDSRRIIVSAWNVGELDKMALAPCHAFFQFYVADGKLSCQLYQRSCDVFLGLPFNIASYALLVHMMAQQCDLDVGDFVWTGGDTHLYSNHMEQTHLQLSREPRALPKLVIKRKPDSLFDYRFDDFEIEGYDPHPGIKAPVAI

SEQ ID NO: 466 - DNA, 1842 bp, Artificial Sequence
  Mouse membrane bound IL-12p70
  misc_feature (1)...(1005): mouse IL-12p40
  misc_feature (1)...(66): IL-12p40 signal sequence
  misc_feature (1006)...(1050): (Gly4-Ser)3 Linker
  misc_feature (1051)...(1629): mouse IL-12p35 del1-22
  misc_feature (1630)...(1839): muB7 TM
  misc_feature (1630)...(1839): muCD80 (Isoform 1)
atgtgtcctcagaagctaaccatctcctggtttgccatcgttttgctggtgtctccactcatggccatgtgggagctggagaaagacgtttatgttgtagaggtggactggactcccgatgcccctggagaaacagtgaacctcacctgtgacacgcctgaagaagatgacatcacctggacctcagaccagagacatggagtcataggctctggaaagaccctgaccatcactgtcaaagagtttctagatgctggccagtacacctgccacaaaggaggcgagactctgagccactcacatctgctgctccacaagaaggaaaatggaatttggtccactgaaattttaaaaaatttcaaaaacaagactttcctgaagtgtgaagcaccaaattactccggacggttcacgtgctcatggctggtgcaaagaaacatggacttgaagttcaacatcaagagcagtagcagttcccctgactctcgggcagtgacatgtggaatggcgtctctgtctgcagagaaggtcacactggaccaaagggactatgagaagtattcagtgtcctgccaggaggatgtcacctgcccaactgccgaggagaccctgcccattgaactggcgttggaagcacggcagcagaataaatatgagaactacagcaccagcttcttcatcagggacatcatcaaaccagacccgcccaagaacttgcagatgaagcctttgaagaactcacaggtggaggtcagctgggagtaccctgactcctggagcactccccattcctacttctccctcaagttctttgttcgaatccagcgcaagaaagaaaagatgaaggagacagaggaggggtgtaaccagaaaggtgcgttcctcgtagagaagacatctaccgaagtccaatgcaaaggcgggaatgtctgcgtgcaagctcaggatcgctattacaattcctcatgcagcaagtgggcatgtgttccctgcagggtccgatccggtggcggtggctcgggcggtggtgggtcgggtggcggcggatctagggtcattccagtctctggacctgccaggtgtcttagccagtcccgaaacctgctgaagaccacagatgacatggtgaagacggccagagaaaaactgaaacattattcctgcactgctgaagacatcgatcatgaagacatcacacgggaccaaaccagcacattgaagacctgtttaccactggaactacacaagaacgagagttgcctggctactagagagacttcttccacaacaagagggagctgcctgcccccacagaagacgtctttgatgatgaccctgtgccttggtagcatctatgaggacttgaagatgtaccagacagagttccaggccatcaacgcagcacttcagaatcacaaccatcagcagatcattctagacaagggcatgctggtggccatcgatgagctgatgcagtctctgaatcataatggcgagactctgcgccagaaacctcctgtgggagaagcagacccttacagagtgaaaatgaagctctgcatcctgcttcacgccttcagcacccgcgtcgtgaccatcaacagggtgatgggctatctgagctccgcccccccagaagaccctcctgatagcaagaacacacttgtgctctttggggcaggattcggcgcagtaataacagtcgtcgtcatcgttgtcatcatcaaatgcttctgtaagcacagaagctgtttcagaagaaatgaggcaagcagagaaacaaacaacagccttaccttcgggcctgaagaagcattagctgaacagaccgtcttcctttag

SEQ ID NO: 467 - DNA, 1767 bp, Artificial Sequence
  Human membrane bound IL-12p70
  misc_feature (1)...(984): huIL-12p40
  misc_feature (985)...(1029): (Gly4-Ser)3 Linker
  misc_feature (1030)...(1620): huIL-12p35 del1-22
  misc_feature (1621)...(1764): Hu CD80 (Isoform 1)
atgtgtcaccagcagttggtcatctcttggttttccctggtttttctggcatctcccctcgtggccatatgggaactgaagaaagatgtttatgtcgtagaattggattggtatccggatgcccctggagaaatggtggtcctcacctgtgacacccctgaagaagatggtatcacctggaccttggaccagagcagtgaggtcttaggctctggcaaaaccctgaccatccaagtcaaagagtttggagatgctggccagtacacctgtcacaaaggaggcgaggttctaagccattcgctcctgctgcttcacaaaaaggaagatggaatttggtccactgatattttaaaggaccagaaagaacccaaaaataagacctttctaagatgcgaggccaagaattattctggacgtttcacctgctggtggctgacgacaatcagtactgatttgacattcagtgtcaaaagcagcagaggctcttctgacccccaaggggtgacgtgcggagctgctacactctctgcagagagagtcagaggggacaacaaggagtatgagtactcagtggagtgccaggaggacagtgcctgcccagctgctgaggagagtctgcccattgaggtcatggtggatgccgttcacaagctcaagtatgaaaactacaccagcagcttcttcatcagggacatcatcaaacctgacccacccaagaacttgcagctgaagccattaaagaattctcggcaggtggaggtcagctgggagtaccctgacacctggagtactccacattcctacttctccctgacattctgcgttcaggtccagggcaagagcaagagagaaaagaaagatagagtcttcacggacaagacctcagccacggtcatctgccgcaaaaatgccagcattagcgtgcgggcccaggaccgctactatagctcatcttggagcgaatgggcatctgtgccctgcagtggtggcggtggctcgggcggtggtgggtcgggtggcggcggatctagaaacctccccgtggccactccagacccaggaatgttcccatgccttcaccactcccaaaacctgctgagggccgtcagcaacatgctccagaaggccagacaaactctagaattttacccttgcacttctgaagagattgatcatgaagatatcacaaaagataaaaccagcacagtggaggcctgtttaccattggaattaaccaagaatgagagttgcctaaattccagagagacctctttcataactaatgggagttgcctggcctccagaaagacctcttttatgatggccctgtgccttagtagtatttatgaagacttgaagatgtaccaggtggagttcaagaccatgaatgcaaagcttctgatggatcctaagaggcagatctttctagatcaaaacatgctggcagttattgatgagctgatgcaggccctgaatttcaacagtgagactgtgccacaaaaatcctcccttgaagaaccggatttttataaaactaaaatcaagctctgcatacttcttcatgctttcagaattcgggcagtgactattgatagagtgatgagctatctgaatgcttccgataacctgctcccatcctgggccattaccttaatctcagtaaatggaatttttgtgatatgctgcctgacctactgctttgccccaagatgcagagagagaaggaggaatgagagattgagaagggaaagtgtacgccctgtataa

SEQ ID NO: 468 - DNA, 1284 bp, Artificial Sequence
  human IRF3 S396D
atgggaaccccaaagccacggattctgccctggctggtgtcgcagctggacctggggcaactggagggcgtggcctgggtgaacaagagccgcacgcgcttccgcatcccttggaagcacggcctacggcaggatgcacagcaggaggatttcggaatcttccaggcctgggccgaggccactggtgcatatgttcccgggagggataagccagacctgccaacctggaagaggaatttccgctctgccctcaaccgcaaagaagggttgcgtttagcagaggaccggagcaaggaccctcacgacccacataaaatctacgagtttgtgaactcaggagttggggacttttcccagccagacacctctccggacaccaatggtggaggcagtacttctgatacccaggaagacattctggatgagttactgggtaacatggtgttggccccactcccagatccgggacccccaagcctggctgtagcccctgagccctgccctcagcccctgcggagccccagcttggacaatcccactcccttcccaaacctggggccctctgagaacccactgaagcggctgttggtgccgggggaagagtgggagttcgaggtgacagccttctaccggggccgccaagtcttccagcagaccatctcctgcccggagggcctgcggctggtggggtccgaagtgggagacaggacgctgcctggatggccagtcacactgccagaccctggcatgtccctgacagacaggggagtgatgagctacgtgaggcatgtgctgagctgcctgggtgggggactggctctctggcgggccgggcagtggctctgggcccagcggctggggcactgccacacatactgggcagtgagcgaggagctgctccccaacagcgggcatgggcctgatggcgaggtccccaaggacaaggaaggaggcgtgtttgacctggggcccttcattgtagatctgattaccttcacggaaggaagcggacgctcaccacgctatgccctctggttctgtgtgggggagtcatggccccaggaccagccgtggaccaagaggctcgtgatggtcaaggttgtgcccacgtgcctcagggccttggtagaaatggcccgggtagggggtgcctcctccctggagaatactgtggacctgcacattgacaacagccacccactctccctcacctccgaccagtacaaggcctacctgcaggacttggtggagggcatggatttccagggccctggggagagctga

SEQ ID NO: 469 - DNA, 567 bp, Homo sapiens
  IFN alpha 2
atggccttgacctttgctttactggtggccctcctggtgctcagctgcaagtcaagctgctctgtgggctgtgatctgcctcaaacccacagcctgggtagcaggaggaccttgatgctcctggcacagatgaggagaatctctcttttctcctgcttgaaggacagacatgactttggatttccccaggaggagtttggcaaccagttccaaaaggctgaaaccatccctgtcctccatgagatgatccagcagatcttcaatctcttcagcacaaaggactcatctgctgcttgggatgagaccctcctagacaaattctacactgaactctaccagcagctgaatgacctggaagcctgtgtgatacagggggtgggggtgacagagactcccctgatgaaggaggactccattctggctgtgaggaaatacttccaaagaatcactctctatctgaaagagaagaaatacagcccttgtgcctgggaggttgtcagagcagaaatcatgagatctttttctttgtcaacaaacttgcaagaaagtttaagaagtaaggaatga

SEQ ID NO: 470 - DNA, 564 bp, Homo sapiens
  IFN beta
atgaccaacaagtgtctcctccaaattgctctcctgttgtgcttctccactacagctctttccatgagctacaacttgcttggattcctacaaagaagcagcaattttcagtgtcagaagctcctgtggcaattgaatgggaggcttgaatactgcctcaaggacaggatgaactttgacatccctgaggagattaagcagctgcagcagttccagaaggaggacgccgcattgaccatctatgagatgctccagaacatctttgctattttcagacaagattcatctagcactggctggaatgagactattgttgagaacctcctggctaatgtctatcatcagataaaccatctgaagacagtcctggaagaaaaactggagaaagaagatttcaccaggggaaaactcatgagcagtctgcacctgaaaagatattatgggaggattctgcattacctgaaggccaaggagtacagtcactgtgcctggaccatagtcagagtggaaatcctaaggaacttttacttcattaacagacttacaggttacctccgaaactga

SEQ ID NO: 471 - DNA, 23 bp, Artificial Sequence
  thya-1 primer
ccttcccagttgtatgagttggc

SEQ ID NO: 472 - DNA, 52 bp, Artificial Sequence
  thya-2 primer
ctgttatccctagaagcagctccagcctacacctgtgtgccttcatccagca

SEQ ID NO: 473 - DNA, 40 bp, Artificial Sequence
  thya-3 primer
gatgaaggcacacagtgaaattgaaggctatgatccgcac

SEQ ID NO: 474 - DNA, 23 bp, Artificial Sequence
  thya-4 primer
gttgccagccataaagtcctgtg

SEQ ID NO: 475 - DNA, 20 bp, Artificial Sequence
  thya-5 primer
ccatgctctttcctggctca

SEQ ID NO: 476 - DNA, 21 bp, Artificial Sequence
  thya-6 primer
ctgacaaagcaccatgaaccg

SEQ ID NO: 477 - DNA, 20 bp, Artificial Sequence
  FRT-3 primer
gtgtaggctggagctgcttc

SEQ ID NO: 478 - DNA, 21 bp, Artificial Sequence
  loxp-4 primer
ggcttcccaaccttaccagag

SEQ ID NO: 479 - DNA, 203 bp, Artificial Sequence
  thyA MHA gBlock fragment
ggcttcccaaccttaccagagggcgccccagctggcaattccgggtaccggcaagtagggataacagggtaatgttatctgcagaccaaggacccagattatgcagcaacacgtttcctgaggaaccatgaaacagtatttagaactgatgcaaaaagtgctggatgaaggcacacagtgaaattgaaggctatgatccgcac

SEQ ID NO: 480 - protein, 15 aa, Artificial Sequence
  amino acid linker
GGGGSGGGGSGGGGS

SEQ ID NO: 481 - protein, 70 aa, Artificial Sequence
  transmembrane and cytosolic portions of murine CD80
PPEDPPDSKNTLVLFGAGFGAVITVVVIVVIIKCFCKHRSCFRRNEASRETNNSLTFGPEEALAEQTVFL

SEQ ID NO: 482 - protein, 328 aa, Artificial Sequence
  human IL-12p40
MCHQQLVISWFSLVFLASPLVAIWELKKDVYVVELDWYPDAPGEMVVLTCDTPEEDGITWTLDQSSEVLGSGKTLTIQVKEFGDAGQYTCHKGGEVLSHSLLLLHKKEDGIWSTDILKDQKEPKNKTFLRCEAKNYSGRFTCWWLTTISTDLTFSVKSSRGSSDPQGVTCGAATLSAERVRGDNKEYEYSVECQEDSACPAAEESLPIEVMVDAVHKLKYENYTSSFFIRDIIKPDPPKNLQLKPLKNSRQVEVSWEYPDTWSTPHSYFSLTFCVQVQGKSKREKKDRVFTDKTSATVICRKNASISVRAQDRYYSSSWSEWASVPCS

SEQ ID NO: 483 - protein, 197 aa, Artificial Sequence
  human IL-12p35
RNLPVATPDPGMFPCLHHSQNLLRAVSNMLQKARQTLEFYPCTSEEIDHEDITKDKTSTVEACLPLELTKNESCLNSRETSFITNGSCLASRKTSFMMALCLSSIYEDLKMYQVEFKTMNAKLLMDPKRQIFLDQNMLAVIDELMQALNFNSETVPQKSSLEEPDFYKTKIKLCILLHAFRIRAVTIDRVMSYLNAS

SEQ ID NO: 484 - protein, 48 aa, Artificial Sequence
  transmembrane and cytosolic portions of human CD80
DNLLPSWAITLISVNGIFVICCLTYCFAPRCRERRRNERLRRESVRPV

SEQ ID NO: 485 - protein, 512 aa, Artificial Sequence
  SC16.56 DLL3HLxCD3HL
  misc_feature (1)...(21): mouse IgGK leader
  misc_feature (22)...(139): SC16.56 VH
  misc_feature (140)...(154): amino acid GS linker
  misc_feature (155)...(261): SC16.56 VL
  misc_feature (262)...(266): amino acid linker
  misc_feature (267)...(382): 145-2C11 VH
  misc_feature (383)...(397): amino acid GS linker
  misc_feature (398)...(504): 145-2C11 VL
  misc_feature (505)...(512): Flag tag
METDTLLLWVLLLWVPGSTGDQIQLVQSGPELKKPGETVKISCKASGYTFTNYGMNWVKQAPGKGLKWMAWINTYTGEPTYADDFKGRFAFSLETSASTASLQIINLKNEDTATYFCARIGDSSPSDYWGQGTTLTVSSGGGGSGGGGSGGGGSSIVMTQTPKFLLVSAGDRVTITCKASQSVSNDVVWYQQKPGQSPKLLIYYASNRYTGVPDRFAGSGYGTDFSFTISTVQAEDLAVYFCQQDYTSPWTFGGGTKLEIRGGGGSEVQLVESGGGLVQPGKSLKLSCEASGFTFSGYGMHWVRQAPGRGLESVAYITSSSINIKYADAVKGRFTVSRDNAKNLLFLQMNILKSEDTAMYYCARFDWDKNYWGQGTMVTVSSGGGGSGGGGSGGGGSDIQMTQSPSSLPASLGDRVTINCQASQDISNYLNWYQQKPGKAPKLLIYYTNKLADGVPSRFSGSGSGRDSSFTISSLESEDIGSYYCQQYYNYPWTFGPGTKLEIKDYKDDDDK

SEQ ID NO: 486 - protein, 512 aa, Artificial Sequence
  SC16.56 DLL3LHxCD3HL
  misc_feature (1)...(21): mouse IgGK leader
  misc_feature (22)...(128): SC16.56 VL
  misc_feature (129)...(143): amino acid GS linker
  misc_feature (144)...(261): SC16.56 VH
  misc_feature (262)...(266): amino acid linker
  misc_feature (267)...(382): 145-2C11 VH
  misc_feature (383)...(397): amino acid GS linker
  misc_feature (398)...(504): 145-2C11 VL
  misc_feature (505)...(512): Flag tag
METDTLLLWVLLLWVPGSTGDSIVMTQTPKFLLVSAGDRVTITCKASQSVSNDVVWYQQKPGQSPKLLIYYASNRYTGVPDRFAGSGYGTDFSFTISTVQAEDLAVYFCQQDYTSPWTFGGGTKLEIRGGGGSGGGGSGGGGSQIQLVQSGPELKKPGETVKISCKASGYTFTNYGMNWVKQAPGKGLKWMAWINTYTGEPTYADDFKGRFAFSLETSASTASLQIINLKNEDTATYFCARIGDSSPSDYWGQGTTLTVSSGGGGSEVQLVESGGGLVQPGKSLKLSCEASGFTFSGYGMHWVRQAPGRGLESVAYITSSSINIKYADAVKGRFTVSRDNAKNLLFLQMNILKSEDTAMYYCARFDWDKNYWGQGTMVTVSSGGGGSGGGGSGGGGSDIQMTQSPSSLPASLGDRVTINCQASQDISNYLNWYQQKPGKAPKLLIYYTNKLADGVPSRFSGSGSGRDSSFTISSLESEDIGSYYCQQYYNYPWTFGPGTKLEIKDYKDDDDK

SEQ ID NO: 487 - protein, 511 aa, Artificial Sequence
  SC16.15 DLL3HLxCD3HL
  misc_feature (1)...(21): mouse IgGK leader
  misc_feature (22)...(138): SC16.15 VH
  misc_feature (139)...(153): amino acid GS linker
  misc_feature (154)...(260): SC16.15 VL
  misc_feature (261)...(265): amino acid linker
  misc_feature (266)...(381): 145-2C11 VH
  misc_feature (382)...(396): amino acid GS linker
  misc_feature (397)...(503): 145-2C11 VL
  misc_feature (504)...(511): Flag tag
METDTLLLWVLLLWVPGSTGDQVQLQQSGAELAKPGASVKMSCKASGYTFTRYWIHWIKQRPGQGLEWIGYINPTTVYTEFNQNFKDKATLTADKSSTTASMQLSSLTSEDSAVYYCARGGSNFFDYWGQGTTLTVSSGGGGSGGGGSGGGGSDIQMTQSPASLAASVGETVAITCRASENIYYNLAWYQQKQGKSPQLLIYTANSLEDGVPSRFSGSGSGTQYSLKINSMQPEDSATYFCKQAYDVPPTFGGGTKLEIKGGGGSEVQLVESGGGLVQPGKSLKLSCEASGFTFSGYGMHWVRQAPGRGLESVAYITSSSINIKYADAVKGRFTVSRDNAKNLLFLQMNILKSEDTAMYYCARFDWDKNYWGQGTMVTVSSGGGGSGGGGSGGGGSDIQMTQSPSSLPASLGDRVTINCQASQDISNYLNWYQQKPGKAPKLLIYYTNKLADGVPSRFSGSGSGRDSSFTISSLESEDIGSYYCQQYYNYPWTFGPGTKLEIKDYKDDDDK

SEQ ID NO: 488 - protein, 511 aa, Artificial Sequence
  SC16.15 DLL3LHxCD3HL
  misc_feature (1)...(21): mouse IgGK leader
  misc_feature (22)...(128): SC16.15 VL
  misc_feature (129)...(143): amino acid GS linker
  misc_feature (144)...(260): SC16.15 VH
  misc_feature (261)...(265): amino acid linker
  misc_feature (266)...(381): 145-2C11 VH
  misc_feature (382)...(396): amino acid GS linker
  misc_feature (397)...(503): 145-2C11 VL
  misc_feature (504)...(511): Flag tag
METDTLLLWVLLLWVPGSTGDDIQMTQSPASLAASVGETVAITCRASENIYYNLAWYQQKQGKSPQLLIYTANSLEDGVPSRFSGSGSGTQYSLKINSMQPEDSATYFCKQAYDVPPTFGGGTKLEIKGGGGSGGGGSGGGGSQVQLQQSGAELAKPGASVKMSCKASGYTFTRYWIHWIKQRPGQGLEWIGYINPTTVYTEFNQNFKDKATLTADKSSTTASMQLSSLTSEDSAVYYCARGGSNFFDYWGQGTTLTVSSGGGGSEVQLVESGGGLVQPGKSLKLSCEASGFTFSGYGMHWVRQAPGRGLESVAYITSSSINIKYADAVKGRFTVSRDNAKNLLFLQMNILKSEDTAMYYCARFDWDKNYWGQGTMVTVSSGGGGSGGGGSGGGGSDIQMTQSPSSLPASLGDRVTINCQASQDISNYLNWYQQKPGKAPKLLIYYTNKLADGVPSRFSGSGSGRDSSFTISSLESEDIGSYYCQQYYNYPWTFGPGTKLEIKDYKDDDDK

SEQ ID NO: 489 - protein, 512 aa, Artificial Sequence
  SC16.34 DLL3HLxCD3HL
  misc_feature (1)...(21): mouse IgGK leader
  misc_feature (22)...(139): SC16.34 VH
  misc_feature (140)...(154): amino acid GS linker
  misc_feature (155)...(261): SC16.34 VL
  misc_feature (262)...(266): amino acid linker
  misc_feature (267)...(382): 145-2C11 VH
  misc_feature (383)...(397): amino acid GS linker
  misc_feature (398)...(504): 145-2C11 VL
  misc_feature (505)...(512): Flag tag
METDTLLLWVLLLWVPGSTGDQIQLVQSGPELKRPGETVKISCKASGYTFTNYGMNWVKQAPGKGLKWMGWINTYTGDPTYADDFKGRFAFSLETSASTAYLQINNLKNEDTATYFCARIGGNSPSDYWGQGTSLTVSSGGGGSGGGGSGGGGSSIVMTQTPKFLLVSAGDRVTITCKASQSVSNDVAWYQQKPGQSPKLLIYYASNRYSGVPDRFTGSGYGTDFTFTISTVQAEDLAVYFCQQDYSSPWTFGGGTKLEIKGGGGSEVQLVESGGGLVQPGKSLKLSCEASGFTFSGYGMHWVRQAPGRGLESVAYITSSSINIKYADAVKGRFTVSRDNAKNLLFLQMNILKSEDTAMYYCARFDWDKNYWGQGTMVTVSSGGGGSGGGGSGGGGSDIQMTQSPSSLPASLGDRVTINCQASQDISNYLNWYQQKPGKAPKLLIYYTNKLADGVPSRFSGSGSGRDSSFTISSLESEDIGSYYCQQYYNYPWTFGPGTKLEIKDYKDDDDK

SEQ ID NO: 490 - protein, 512 aa, Artificial Sequence
  SC16.34 DLL3LHxCD3HL
  misc_feature (1)...(21): mouse IgGK leader
  misc_feature (22)...(128): SC16.34 VL
  misc_feature (129)...(143): amino acid GS linker
  misc_feature (144)...(261): SC16.34 VH
  misc_feature (262)...(266): amino acid linker
  misc_feature (267)...(382): 145-2C11 VH
  misc_feature (383)...(397): amino acid GS linker
  misc_feature (398)...(504): 145-2C11 VL
  misc_feature (505)...(512): Flag tag
METDTLLLWVLLLWVPGSTGDSIVMTQTPKFLLVSAGDRVTITCKASQSVSNDVAWYQQKPGQSPKLLIYYASNRYSGVPDRFTGSGYGTDFTFTISTVQAEDLAVYFCQQDYSSPWTFGGGTKLEIKGGGGSGGGGSGGGGSQIQLVQSGPELKRPGETVKISCKASGYTFTNYGMNWVKQAPGKGLKWMGWINTYTGDPTYADDFKGRFAFSLETSASTAYLQINNLKNEDTATYFCARIGGNSPSDYWGQGTSLTVSSGGGGSEVQLVESGGGLVQPGKSLKLSCEASGFTFSGYGMHWVRQAPGRGLESVAYITSSSINIKYADAVKGRFTVSRDNAKNLLFLQMNILKSEDTAMYYCARFDWDKNYWGQGTMVTVSSGGGGSGGGGSGGGGSDIQMTQSPSSLPASLGDRVTINCQASQDISNYLNWYQQKPGKAPKLLIYYTNKLADGVPSRFSGSGSGRDSSFTISSLESEDIGSYYCQQYYNYPWTFGPGTKLEIKDYKDDDDK

SEQ ID NO: 491 - DNA, 60 bp, Artificial Sequence
  codon optimized leader sequence
atggagacacctgcccagctgctgttcctgctgctgctgtggctgcccgacaccaccggc

SEQ ID NO: 492 - protein, 8 aa, Artificial Sequence
  ovalbumin peptide
SIINFEKL

SEQ ID NO: 493 - protein, 427 aa, Artificial Sequence
  human IRF3 S396D
MGTPKPRILPWLVSQLDLGQLEGVAWVNKSRTRFRIPWKHGLRQDAQQEDFGIFQAWAEATGAYVPGRDKPDLPTWKRNFRSALNRKEGLRLAEDRSKDPHDPHKIYEFVNSGVGDFSQPDTSPDTNGGGSTSDTQEDILDELLGNMVLAPLPDPGPPSLAVAPEPCPQPLRSPSLDNPTPFPNLGPSENPLKRLLVPGEEWEFEVTAFYRGRQVFQQTISCPEGLRLVGSEVGDRTLPGWPVTLPDPGMSLTDRGVMSYVRHVLSCLGGGLALWRAGQWLWAQRLGHCHTYWAVSEELLPNSGHGPDGEVPKDKEGGVFDLGPFIVDLITFTEGSGRSPRYALWFCVGESWPQDQPWTKRLVMVKVVPTCLRALVEMARVGGASSLENTVDLHIDNSHPLSLTSDQYKAYLQDLVEGMDFQGPGES

SEQ ID NO: 494 - protein, 188 aa, Homo sapiens
  IFN alpha 2
MALTFALLVALLVLSCKSSCSVGCDLPQTHSLGSRRTLMLLAQMRRISLFSCLKDRHDFGFPQEEFGNQFQKAETIPVLHEMIQQIFNLFSTKDSSAAWDETLLDKFYTELYQQLNDLEACVIQGVGVTETPLMKEDSILAVRKYFQRITLYLKEKKYSPCAWEVVRAEIMRSFSLSTNLQESLRSKE

SEQ ID NO: 495 - protein, 187 aa, Homo sapiens
  IFN beta
MTNKCLLQIALLLCFSTTALSMSYNLLGFLQRSSNFQCQKLLWQLNGRLEYCLKDRMNFDIPEEIKQLQQFQKEDAALTIYEMLQNIFAIFRQDSSSTGWNETIVENLLANVYHQINHLKTVLEEKLEKEDFTRGKLMSSLHLKRYYGRILHYLKAKEYSHCAWTIVRVEILRNFYFINRLTGYLRN

SEQ ID NO: 496 - RNA, 4284 nt, Artificial Sequence
  Pfizer-BioNTech COVID-19 mRNA vaccine
  modified_base 6, 11, 14, 16, 17, 19, 20, 22, 25, 36, 56, 58, 59, 62, 64,65, 68, 71, 74, 77, 81, 83, 86, 88, 97, 99, 101, 107, 125,129, 136, 148, 149, 150, 161, 163, 166, 179, 181, 182, 187,194, 197, 202, 204, 215, 217, 218, 221, 225, 226, 227, 229,230, 239, 244, 247, 248, 257, 263, 265, 276, 289, 290, 302,305, 310, 311, 323, 325, 328, 329, 330, 346, 353, 356, 364,368, 370, 371, 383, 404, 407, 410, 413, 431, 434, 437, 443,445, 451, 452, 457, 458, 460, 472, 473, 476, 482, 484, 487,508, 512, 523, 524, 530, 532, 550, 556, 557, 562, 566, 568,576, 577, 578, 581, 584, 590, 610, 611, 620, 628, 629, 632,634, 635, 636, 644, 652, 655, 656, 662, 664, 681, 683, 689,692, 699, 701, 705, 712, 713, 715, 717, 720, 722, 731, 734,738, 740, 746, 752, 758, 766, 767, 768, 776, 779, 785, 796,800, 807, 813, 826, 834, 837, 846, 847, 850, 852, 854, 859,863, 870, 877, 878, 881, 884, 889, 908, 920, 924, 925, 927,930, 932, 936, 939, 941, 955, 962, 967, 970, 971, 977, 989,991, 1006, 1007, 1013, 1027, 1031, 1034, 1039, 1040, 1047,1049, 1056, 1058, 1060, 1066, 1067, 1076, 1078, 1079, 1083,1093, 1094, 1099, 1101, 1103, 1105, 1111, 1127, 1134, 1135,1139, 1147, 1150, 1154, 1157, 1159, 1165, 1174, 1175, 1183,1184, 1189, 1192, 1199, 1201, 1206, 1214, 1223, 1225, 1228,1229, 1238, 1240, 1252, 1253, 1256, 1259, 1269, 1274, 1283,1284, 1290, 1307, 1315, 1321, 1328, 1339, 1340, 1348, 1350,1352, 1355, 1356, 1360, 1376, 1381, 1388, 1399, 1404, 1405,1409, 1411, 1418, 1420, 1421, 1429, 1434, 1436, 1444, 1445,1457, 1459, 1469, 1471, 1473, 1491, 1492, 1494, 1502, 1510,1511, 1516, 1519, 1522, 1523, 1529, 1534, 1537, 1543, 1544,1545, 1557, 1562, 1567, 1569, 1576, 1583, 1586, 1589, 1592,1597, 1598, 1604, 1607, 1611, 1617, 1625, 1627, 1635, 1650,1652, 1655, 1666, 1670, 1675, 1676, 1681, 1682, 1691, 1706,1709, 1729, 1730, 1733, 1738, 1739, 1747, 1748, 1749, 1758,1760, 1767, 1781, 1782, 1788, 1799, 1805, 1808, 1814, 1821,1822, 1828, 1829, 1838, 1840, 1842, 1844, 1847, 1854, 1872,1877, 1883, 1886, 1888, 1898, 1903, 1905, 1913, 1919, 1925,1926, 1935, 1940, 1947, 1951, 1958, 1960, 1963, 1977, 1979,1981, 1982, 1983, 1999, 2001, 2003, 2006, 2021, 2028, 2032,2038, 2045, 2051, 2058, 2063, 2065, 2074, 2097, 2114, 2129,2132, 2133, 2137, 2144, 2146, 2148, 2150, 2168, 2173, 2176,2185, 2187, 2189, 2193, 2195, 2206, 2207, 2213, 2219, 2231,2234, 2238, 2240, 2242, 2246, 2261, 2266, 2273, 2275, 2279,2281, 2289, 2290, 2299, 2302, 2309, 2312, 2315, 2320, 2329,2330, 2332, 2342, 2346, 2354, 2363, 2369, 2396, 2398, 2399,2408, 2417, 2419, 2430, 2433, 2435, 2443, 2444, 2452, 2453,2457, 2458, 2459, 2468, 2469, 2471, 2478, 2481, 2503, 2504,2507, 2516, 2519, 2521, 2522, 2531, 2537, 2551, 2552, 2555,2563, 2565, 2571, 2572, 2574, 2576, 2585, 2586, 2598, 2600,2603, 2604, 2605, 2617, 2618, 2619, 2627, 2633, 2636, 2640,2643, 2645, 2648, 2655, 2660, 2663, 2671, 2677, 2679, 2684,2687, 2699, 2710, 2716, 2717, 2718, 2733, 2735, 2741, 2746,2747, 2748, 2751, 2753, 2759, 2764, 2770, 2771, 2780, 2786,2796, 2798, 2801, 2803, 2819, 2822, 2833, 2834, 2846, 2855,2867, 2888, 2897, 2906, 2909, 2919, 2930, 2939, 2942, 2951,2953, 2956, 2962, 2963, 2972, 2977, 2979, 2981, 2984, 2991,2993, 2996, 3005, 3012, 3015, 3026, 3032, 3041, 3044, 3056,3065, 3073, 3077, 3089, 3092, 3107, 3108, 3115, 3117, 3123,3125, 3140, 3142, 3144, 3148, 3150, 3152, 3155, 3173, 3178,3179, 3180, 3181, 3193, 3200, 3203, 3208, 3209, 3213, 3217,3219, 3225, 3233, 3236, 3238, 3239, 3240, 3242, 3248, 3253,3255, 3257, 3264, 3276, 3277, 3278, 3288, 3296, 3298, 3319,3320, 3321, 3324, 3335, 3337, 3338, 3341, 3343, 3357, 3358,3361, 3362, 3365, 3379, 3380, 3382, 3395, 3398, 3415, 3416,3419, 3421, 3423, 3430, 3437, 3440, 3443, 3449, 3450, 3452,3459, 3464, 3466, 3474, 3476, 3488, 3496, 3497, 3509, 3517,3520, 3521, 3522, 3545, 3551, 3558, 3560, 3569, 3573, 3581,3584, 3590, 3602, 3611, 3620, 3630, 3632, 3644, 3647, 3653,3662, 3670, 3679, 3683, 3688, 3694, 3697, 3701, 3703, 3707,3712, 3713, 3714, 3716, 3725, 3728, 3729, 3734, 3737, 3740,3743, 3749, 3752, 3755, 3757, 3759, 3760, 3764, 3772, 3775,3777, 3781, 3785, 3793, 3795, 3796, 3798, 3802, 3804, 3811,3814, 3820, 3821, 3834, 3835, 3837, 3845, 3848, 3857, 3863,3868, 3874, 3877, 3881, 3887, 3890, 3893, 3897, 3906, 3909,3913, 3919, 3920, 3921, 3926, 3929, 3933, 3942, 3944, 3954,3959, 3966, 3968, 3971, 3978, 3984, 3992, 4000, 4002, 4005,4008, 4009, 4019, 4036, 4042, 4051, 4052, 4057, 4084, 4087,4088, 4093,  4094, 4095, 4101, 4111, 4112, 4113, 4117, 4122,4124,  4127, 4138, 4139, 4142, 4146, 4147, 4148, 4151, 4165,4171, 4208, 4210, 4214: n = 1-methyl-3'-pseudouridylyl
gagaanaaacnagnanncnncnggnccccacagacncagagagaacccgccaccangnncgngnnccnggngcngcngccncnggngnccagccagngngngaaccngaccaccagaacacagcngccnccagccnacaccaacagcnnnaccagaggcgngnacnaccccgacaaggngnncaganccagcgngcngcacncnacccaggaccngnnccngccnnncnncagcaacgngaccnggnnccacgccanccacgngnccggcaccaanggcaccaagaganncgacaaccccgngcngcccnncaacgacggggngnacnnngccagcaccgagaagnccaacancancagaggcnggancnncggcaccacacnggacagcaagacccagagccngcngancgngaacaacgccaccaacgnggncancaaagngngcgagnnccagnncngcaacgaccccnnccngggcgncnacnaccacaagaacaacaagagcngganggaaagcgagnnccgggngnacagcagcgccaacaacngcaccnncgagnacgngncccagccnnnccnganggaccnggaaggcaagcagggcaacnncaagaaccngcgcgagnncgngnnnaagaacancgacggcnacnncaagancnacagcaagcacaccccnancaaccncgngcgggancngccncagggcnncncngcncnggaaccccnggnggancngcccancggcancaacancacccggnnncagacacngcnggcccngcacagaagcnaccngacaccnggcganagcagcagcgganggacagcnggngccgccgcnnacnangngggcnaccngcagccnagaaccnnccngcngaagnacaacgagaacggcaccancaccgacgccgngganngngcncngganccncngagcgagacaaagngcacccngaagnccnncaccgnggaaaagggcancnaccagaccagcaacnnccgggngcagcccaccgaanccancgngcggnnccccaanancaccaancngngccccnncggcgaggngnncaangccaccaganncgccncngngnacgccnggaaccggaagcggancagcaanngcgnggccgacnacnccgngcngnacaacnccgccagcnncagcaccnncaagngcnacggcgngnccccnaccaagcngaacgaccngngcnncacaaacgngnacgccgacagcnncgnganccggggagangaagngcggcaganngccccnggacagacaggcaagancgccgacnacaacnacaagcngcccgacgacnncaccggcngngnganngccnggaacagcaacaaccnggacnccaaagncggcggcaacnacaannaccngnaccggcngnnccggaagnccaancngaagcccnncgagcgggacancnccaccgagancnancaggccggcagcaccccnngnaacggcgnggaaggcnncaacngcnacnncccacngcagnccnacggcnnncagcccacaaanggcgngggcnancagcccnacagagnggnggngcngagcnncgaacngcngcangccccngccacagngngcggcccnaagaaaagcaccaancncgngaagaacaaangcgngaacnncaacnncaacggccngaccggcaccggcgngcngacagagagcaacaagaagnnccngccannccagcagnnnggccggganancgccganaccacagacgccgnnagaganccccagacacnggaaanccnggacancaccccnngcagcnncggcggagngncngngancaccccnggcaccaacaccagcaancaggnggcagngcngnaccaggacgngaacngnaccgaagngcccgnggccanncacgccgancagcngacaccnacanggcgggngnacnccaccggcagcaangngnnncagaccagagccggcngncngancggagccgagcacgngaacaanagcnacgagngcgacanccccancggcgcnggaancngcgccagcnaccagacacagacaaacagcccncggagagccagaagcgnggccagccagagcancanngccnacacaangncncngggcgccgagaacagcgnggccnacnccaacaacncnancgcnanccccaccaacnncaccancagcgngaccacagaganccngccngngnccangaccaagaccagcgnggacngcaccangnacancngcggcgannccaccgagngcnccaaccngcngcngcagnacggcagcnncngcacccagcngaanagagcccngacagggancgccgnggaacaggacaagaacacccaagaggngnncgcccaagngaagcagancnacaagaccccnccnancaaggacnncggcggcnncaannncagccaganncngcccganccnagcaagcccagcaagcggagcnncancgaggaccngcngnncaacaaagngacacnggccgacgccggcnncancaagcagnanggcganngncngggcgacanngccgccagggancngannngcgcccagaagnnnaacggacngacagngcngccnccncngcngaccgangagangancgcccagnacacancngcccngcnggccggcacaancacaagcggcnggacannnggagcaggcgccgcncngcaganccccnnngcnangcaganggccnaccggnncaacggcancggagngacccagaangngcngnacgagaaccagaagcngancgccaaccagnncaacagcgccancggcaaganccaggacagccngagcagcacagcaagcgcccngggaaagcngcaggacgnggncaaccagaangcccaggcacngaacacccnggncaagcagcngnccnccaacnncggcgccancagcncngngcngaacgananccngagcagacnggacccnccngaggccgaggngcagancgacagacngancacaggcagacngcagagccnccagacanacgngacccagcagcngancagagccgccgagannagagccncngccaancnggccgccaccaagangncngagngngngcngggccagagcaagagagnggacnnnngcggcaagggcnaccaccngangagcnncccncagncngccccncacggcgnggngnnncngcacgngacanangngcccgcncaagagaagaannncaccaccgcnccagccancngccacgacggcaaagcccacnnnccnagagaaggcgngnncgngnccaacggcacccannggnncgngacacagcggaacnncnacgagccccagancancaccaccgacaacaccnncgngncnggcaacngcgacgncgngancggcanngngaacaanaccgngnacgacccncngcagcccgagcnggacagcnncaaagaggaacnggacaagnacnnnaagaaccacacaagccccgacgnggaccngggcganancagcggaancaangccagcgncgngaacanccagaaagagancgaccggcngaacgaggnggccaagaancngaacgagagccngancgaccngcaagaacnggggaagnacgagcagnacancaagnggcccnggnacancnggcngggcnnnancgccggacnganngccancgnganggncacaancangcngngnngcangaccagcngcngnagcngccngaagggcngnngnagcngnggcagcngcngcaagnncgacgaggacganncngagcccgngcngaagggcgngaaacngcacnacacangangacncgagcnggnacngcangcacgcaangcnagcngccccnnncccgnccngggnaccccgagncncccccgaccncgggncccaggnangcncccaccnccaccngccccacncaccaccncngcnagnnccagacaccncccaagcacgcagcaangcagcncaaaacgcnnagccnagccacacccccacgggaaacagcagngannaaccnnnagcaanaaacgaaagnnnaacnaagcnanacnaaccccagggnnggncaannncgngccagccacacccnggagcnagcaaaaaaaaaaaaaaaaaaaaaaaaaaaaaagcanangacnaaaaaaaaaaaaaaaaaaaaaaaaaaaaaaaaaaaaaaaaaaaaaaaaaaaaaaaaaaaaaaaaaaaaaa
